(19) United States
(12) Patent Application Publication
(10) Pub. No.: US 2004/0248791 A1
(43) Pub. Date: Dec. 9, 2004

(54) Insect g protein-coupled receptor genes and uses thereof

(76) Inventors: Eric Spana, Raleigh, NC (US); Kim Kamdar, Boston, MA (US); Lynn Stam, Raleigh, NC (US); Scott Valentine, Research Park Triangle, NC (US); Charles Michael Griswold, Cary, NC (US)

Correspondence Address: SYNGENTA BIOTECHNOLOGY, INC., PATENT DEPARTMENT, 3054 CORNWALLIS ROAD, P.O. BOX 12257, RESEARCH TRIANGLE PARK, NC, 27709-2257, US

(21) Appl. No.: 10/489,425

(22) PCT Filed: Dec. 18, 2002
(86) PCT No.: PCT/US02/40525

Related U.S. Application Data
(60) Provisional application No. 60/341,512, filed on Dec. 18, 2001.

(51) Int. Cl. C12Q 1/68; C07H 21/04; C07K 14/705; C12N 5/06; C12N 5/04

(52) U.S. Cl. 514/12; 530/350; 536/23.5; 435/6; 435/69.1; 435/320.1; 435/252.3; 435/348; 435/419

(57) ABSTRACT

The present invention provides isolated nucleic acids encoding insect G protein-coupled receptor (GPCR) polypeptides, isolated insect GPCR polypeptides, and uses thereof. Further provided are recombinant proteins and methods for identifying inhibitors to these proteins. The disclosed insect GPCR nucleic acids and polypeptides can be used in screening assays to identify modulating compounds. Protein inhibitors active in the methods disclosed herein are useful as insecticidal, ectoparasiticidal, antiparasitic, anthenenthic and acaracidal agents.

[0001] This application claims the benefit of U.S. Provisional Application No. 60/341,512 filed Dec. 18, 2001, which is hereby incorporated by reference in its entirety.

### FIELD OF THE INVENTION

[0002] The present invention generally relates to G protein-coupled receptor (GPCR) genes from Drosophila melanogaster, Heliothis virescens, or Manduca sexta. More particularly, the present invention provides novel GPCR nucleic acid and polypeptide sequences, chimeric genes comprising the disclosed GPCR sequences, antibodies that specifically recognize the disclosed GPCR polypeptides, modulators of GPCR nucleic acids and polypeptides, and uses thereof.

### Table of Abbreviations

[0003] ATCC American Tissue Culture Collection

[0004] dsRNA double-stranded RNA

[0005] dsRNAi double-stranded RNA interference

[0006] FCS Fluorescence Correlation Spectroscopy

[0007] GPCR G protein-coupled receptor

[0008] GST glutathione S transferase

[0009] HMM Hidden Markov Model

[0010] IPM integrated pest management

[0011] PCR polymerase chain reaction

[0012] PEG polyethylene glycol

[0013] RACE rapid amplification of cDNA ends

[0014] SELDI-TOF MS Surface-Enhanced Laser Desorption/Ionization Time-of-Flight Mass Spectroscopy

[0015] Sf9 cells Spodoptera frugiperda cells

[0016] SPR Surface Plasmon Resonance

### BACKGROUND

[0017] Insects contribute or cause many human and animal diseases, and are responsible for substantial agricultural and property damage. The societal costs associated with insect pests in dollars, time, and suffering are monumental. To combat these problems, insecticidal compounds have been developed and employed. The total worldwide market size for insecticide crop protection is over $5 billion, and insecticide products comprise approximately 32% of world consumption of pesticides.

[0018] Insecticide development has been guided predominantly by lead-finding efforts for new chemical structures. According to this strategy, chemical derivatization of a known insecticide is performed, and the synthesized compounds are analyzed for insecticidal activity. An alternative approach relies on methods for detecting molecular interactions between a candidate compound and a target molecule. An ideal target molecule is precisely regulated during insect development, such that modulation of the activity or level of activity of the target molecule results in organismal lethality. High throughput screening methods have enabled rapid screening of diverse and populous compound libraries for an ability to interact with a target molecule. The novel modulators discovered by such methods are useful as insecticides.

[0019] A target molecule can be further selected based on modulation of the target molecule activity that results in lethality during larval development. The insect life cycle requires successive larval or nymph stages that are devoted to growth such that the animal can increase mass by several thousand-fold. To sustain this growth, immature insects feed unabated for prolonged periods, and thus are particularly deleterious to agricultural crops during this developmental stage.

[0020] A crucial factor in the proper development and physiology of multi-cellular organisms is the correct interaction of a cell with its environment. One mechanism for an environmental signal to be recognized by a cell is by a plasma membrane localized receptor protein. Of the many categories of receptors found on the plasma membrane, one type, the G protein-coupled receptor (GPCR) has been shown to transduce a wide variety of extracellular signals into the cell cytoplasm via a reversible coupling to heterotrimeric G proteins. GPCRs proteins span the plasma membrane seven times in such a conformation as to have their amino terminus on the outside of the cell followed by seven consecutive transmembrane domains and their carboxy terminus on the cytoplasmic side of the membrane. Interacting molecules or ligands interact with the amino terminus and/or the three extracellular loops to produce a conformational change that allows the cytoplasmic portions of the receptor to alter its binding to the cytoplasmic G proteins. G protein-coupled receptors such as those in the present invention are characterized by the ability of a ligand to promote the formation of a high-affinity ternary complex between the ligand, the receptor, and an intracellular G protein. This complex is formed in the presence of physiological concentrations of GTP, and results in the dissociation of the alpha subunit of the G protein from the beta and gamma subunits of the G protein, which further results in a functional response, i.e., activation of downstream effectors such as adenylyl cyclase or phospholipase C.

[0021] The ability of a GPCR to produce an intracellular response to an extracellular stimulus has made this class of protein highly valued in drug and chemical discovery. It has been estimated that as much as 60% of all pharmaceutical drugs on the market are involved either directly or indirectly with GPCR signaling. Some examples of these drugs include Loratadine (Claritin®) an H1-histamine receptor antagonist and Theophylin (TheoDur®) an adenosine receptor antagonist. Complex physiological responses in humans such as modulation of pain perception and appetite regulation have been identified as consequences of GPCR signaling.

[0022] Like humans, many insect developmental and physiological processes are regulated by GPCR signaling. For example, the serotonin receptor 5-HT2 is required for embryonic development in Drosophila (Colas et al. (1999) Mech. Dev. 87: 67-76). Another GPCR called “flamingo” has multiple roles in development including dendrite formation and cell polarity (Gao et al. (2000) Neuron 28: 91-101; and Usui et at. (1999) Cell 98: 585-595). Also, fluid secretion in the insect renal gland, the malpighian tubule, has been shown to be directed by multiple GPCRs (Pietrantonio et al. (2001) Insect Mol Biol 10(4):357-69). These multiple functions throughout the life of an insect are why these GPCRs make excellent targets for insecticide discovery. Nature itself has shown that the toxin of the Black Widow spider, Latrotoxin, acts through a GPCR called latrophilin to initiate its effect.

[0023] There exists a continuing demand for insecticides that show improved efficacy and new modes of action. To this end, the present invention discloses a functional characterization of G protein-coupled receptors during Drosophila development.

### SUMMARY OF INVENTION

[0024] The present invention discloses isolated insect GPCR polypeptides and isolated nucleic acid molecules encoding the same. Preferably, an isolated insect GPCR polypeptide, or functional portion thereof, comprises a polypeptide encoded by the nucleic acid molecule of any one of odd numbered sequences of SEQ ID NOs:1-107; a polypeptide encoded by a nucleic acid molecule that is substantially identical to any one of odd numbered sequences of SEQ ID NOs:1-107; a polypeptide having an amino acid sequence of any one of even numbered sequences of SEQ ID NOs:2-108; a polypeptide that is a biological equivalent of any one of even numbered sequences of SEQ ID NOs:2-108; or a polypeptide that is immunologically cross-reactive with an antibody that shows specific binding with a polypeptide comprising some or all amino acids of any one of even numbered sequences of SEQ ID NOs:2-108.

[0025] In one embodiment, the present invention provides an isolated nucleic acid molecule comprising a nucleotide sequence, the complement of which hybridizes under stringent conditions to a sequence selected from the group consisting of the odd numbered SEQ ID NOs:1-107. In another embodiment, the present invention provides an isolated nucleic acid molecule comprising a nucleotide sequence that encodes a protein comprising an amino acid sequence having at least 60%, preferably 70%, more preferably 80%, still more preferably 90%, even more preferably 95%, and most preferably 99-100% sequence identity to an amino acid sequence selected from the group consisting of the even numbered SEQ ID NOs:2-108.

[0026] The present invention also provides a chimeric construct comprising promoter operatively linked to a nucleic acid molecule according to the present invention, wherein the promoter is preferably functional in a eukaryote, wherein the promoter is preferably heterologous to the nucleic acid molecule. More preferably, the promoter is functional in a plant.

[0027] The present invention further provides a recombinant vector comprising a chimeric construct according to the present invention, wherein said vector is capable of being stably transformed into a host cell. The present invention still further provides a host cell comprising a nucleic acid molecule according to the present invention, wherein said nucleic acid molecule is preferably expressible in the cell. The host cell is preferably selected from the group consisting of a plant cell, a yeast cell, an insect cell, and a prokaryotic cell. The present invention additionally provides a plant or seed comprising a plant cell according to the present invention.

[0028] The present invention also provides proteins essential for growth of an insect. In one embodiment, the present invention provides an isolated protein comprising an amino acid sequence having at least 60%, preferably 70%, more preferably 80%, still more preferably 90%, even more preferably 95%, and most preferably 99-100% sequence identity to an amino acid sequence selected from the group consisting of the even numbered SEQ ID NOs:2-108. In accordance with another embodiment, the present invention also relates to the recombinant production of proteins of the invention and methods of using the proteins of the invention in assays for identifying compounds that interact with the protein.

[0029] In another aspect of the invention, a method is provided for detecting a nucleic acid molecule that encodes an insect GPCR polypeptide. According to the method, a biological sample having nucleic acid material is hybridized under stringent hybridization conditions to an insect GPCR nucleic acid molecule of the present invention. Such hybridization enables a nucleic acid molecule of the biological sample and the insect GPCR nucleic acid molecule to form a detectable duplex structure. Preferably, the insect GPCR nucleic acid molecule includes some or all nucleotides of any one of odd numbered sequences of SEQ ID NOs:1-107. The present invention further teaches an antibody that specifically recognizes an insect GPCR polypeptide. Preferably, the antibody recognizes some or all amino acids of any one of even numbered sequences of SEQ ID NOs:2-108. A method for producing an insect GPCR antibody is also disclosed, and the method comprises recombinantly or synthetically producing an insect GPCR polypeptide, or portion thereof, as set forth in any one of even numbered sequences of SEQ ID NOs:2-108; formulating the insect GPCR polypeptide so that it is an effective immunogen; immunizing an animal with the formulated polypeptide to generate an immune response that includes production of insect GPCR antibodies; and collecting blood serum from the immunized animal containing antibodies that specifically recognize an insect GPCR polypeptide. Antibody-producing cells can be optionally fused with an immortal cell line whereby a monoclonal antibody that specifically recognizes an insect GPCR polypeptide can be selected.

[0030] A method is also provided for detecting a level of insect GPCR polypeptide using an antibody that recognizes an insect GPCR polypeptide of any of even numbered sequences of SEQ ID NOs:2-108. According to the method, a biological sample is obtained from an experimental subject and a control subject, and an insect GPCR polypeptide is detected in the sample by immunochemical reaction with the insect GPCR antibody. Preferably, the antibody recognizes amino acids of any one of even numbered sequences of SEQ ID NOs:2-108; and is prepared according to a method of the present invention for producing such an antibody.

[0031] The present invention further discloses a method for identifying a compound that modulates GPCR function. The method comprises: (a) exposing an isolated insect GPCR polypeptide of any one of even numbered sequences of SEQ ID NOs:2-108 to one or more compounds, and (b) assaying binding of a compound to the isolated insect GPCR polypeptide. A compound is selected that demonstrates specific binding to the isolated insect GPCR polypeptide. Preferably, the modulator is a chemical compound, a protein, a peptide, a nucleic acid, or an antibody, and was prepared according to a method disclosed herein.

[0032] The present invention also provides a method for identifying an insecticidal compound that modulates GPCR function. The method comprises: (a) isolating an insect GPCR polypeptide of any one of even numbered SEQ ID NOs:2-108, wherein modulation of the insect GPCR polypeptide confers lethality of an insect; (b) exposing the isolated insect GPCR polypeptide to a plurality of substances; (c) assaying binding of a substance to the isolated GPCR polypeptide; and (d) selecting a substance that demonstrates specific binding to the isolated insect GPCR polypeptide. Preferably, the modulator is a chemical compound, a protein, a peptide, a nucleic acid, or an antibody, and was prepared according to a method disclosed herein.

[0033] The present invention provides nucleic acid molecules isolated from insects comprising nucleotide sequences that encode proteins essential for insect viability, preferably G protein-coupled receptors. This knowledge is exploited to provide novel insecticidal modes of action. The critical role in insect growth of the proteins encoded by each of the nucleotide sequences of the invention implies that chemicals that inhibit the function of any one of these proteins in insects are likely to have detrimental effects on insects and are potentially good insecticide candidates. Thus, the proteins encoded by the essential nucleotide sequences provide the bases for assays designed to easily and rapidly identify novel insecticides.

[0034] The present invention therefore provides methods of using a purified protein encoded by any one of the nucleotide sequences described below to identify inhibitors thereof, which can then be used as insecticides to suppress the growth of undesirable insects, e.g. in fields where crops are grown, particularly agronomically important crops such as maize and other cereal crops such as wheat, oats, rye, sorghum, rice, barley, millet, turf and forage grasses, and the like, as well as cotton, sugar cane, sugar beet, oilseed rape, and soybeans.

[0035] According to another aspect, the present invention provides a method of identifying an insecticidal compound, comprising: (a) combining a polypeptide comprising an amino acid sequence at least 90% identical to an amino acid sequence selected from the group consisting of the even numbered SEQ ID NOs:2-108 with a compound to be tested for the ability to bind to said polypeptide, under conditions conducive to binding; (b) selecting a compound identified in (a) that binds to said polypeptide; (c) applying a compound selected in (b) to a plant to test for insecticidal activity; and (d) selecting a compound identified in (c) that has insecticidal activity. Preferably, the polypeptide comprises an amino acid sequence at least 95% identical to an amino acid sequence selected from the group consisting of the even numbered SEQ ID NOs:2-108. More preferably, the polypeptide comprises an amino acid sequence at least 99% identical to an amino acid sequence selected from the group consisting of the even numbered SEQ ID NOs:2-108. Most preferably, the polypeptide comprises an amino acid sequence selected from the group consisting of the even numbered SEQ ID NOs:2-108. The present invention also provides a method for killing or inhibiting the growth or viability of an insect, comprising applying to the insect, or applying to plant tissue, an insecticidal compound identified according to this method.

[0036] According to yet another aspect, the present invention provides a method of identifying an insecticidal compound, comprising: (a) combining a polypeptide comprising an amino acid sequence at least 90% identical to an amino acid sequence selected from the group consisting of the even numbered SEQ ID NOs:2-108 with a compound to be tested for the ability to inhibit the activity of said polypeptide, under conditions conducive to inhibition; (b) selecting a compound identified in (a) that inhibits the activity of said polypeptide; (c) applying a compound selected in (b) to an insect to test for insecticidal activity; and (d) selecting a compound identified in (c) that has insecticidal activity. Preferably, the polypeptide comprises an amino acid sequence at least 95% identical to an amino acid sequence selected from the group consisting of the even numbered SEQ ID NOs:2-108. More preferably, the polypeptide comprises an amino acid sequence at least 99% identical to an amino acid sequence selected from the group consisting of the even numbered SEQ ID NOs:2-108. Most preferably, the polypeptide comprises an amino acid sequence selected from the group consisting of the even numbered SEQ ID NOs:2-108. The present invention also provides a method for killing or inhibiting the growth or viability of an insect, comprising applying to the insect, or to plant tissue, the insecticidal compound identified according to this method.

[0037] The present invention still further provides a method for killing or inhibiting the growth or viability of an insect, comprising inhibiting expression in said insect of a protein having at least 60%, preferably 70%, more preferably 80%, still more preferably 90%, even more preferably 95%, and most preferably 99-100% sequence identity to an amino acid sequence selected from the group consisting of the even numbered SEQ ID NOs:2-108.

[0038] The present invention further provides a method for preventing or treating an insect infestation of a plant, the method comprising: (a) preparing an insecticidal composition that is a modulator of an insect GPCR set forth as any one of even-numbered SEQ ID NOs:2-108; and (b) contacting an effective dose of the insecticidal composition with a plant, whereby an insect infestation of the plant is prevented or abrogated. Preferably, the insecticidal composition comprises a chemical compound, a protein, a peptide, a nucleic acid, or an antibody, and was prepared according to a method disclosed herein. Preferably, the insect infestation is abrogated by lethality of the insect. In one embodiment, the insecticidal composition also displays nematicide activity, such that contacting an effective dose of the insecticidal composition with a plant prevents or abrogates a nematode infestation of the plant.

[0039] The present invention further provides a method for preventing or abrogating an insect infestation of a plant, the method comprising: (a) expressing in a plant an insect GPCR modulator that modulates the activity of an insect GPCR polypeptide of any one of even-numbered SEQ ID NOs:2-108, whereby an insect infestation of a plant is prevented or abrogated. Preferably, the insecticidal composition comprises a protein, a peptide, a nucleic acid, or an antibody. In one embodiment, the insecticidal composition additionally displays nematicidal activity, such that expression of insect GPCR modulator in a plant prevents or abrogates a nematode infestation of the plant. The present invention further embodies plants, plant tissues, plant seeds, and plant cells that express an insect GPCR modulator and that are therefore able to inhibit plant parasitic nematode infestation.

[0040] Accordingly, it is an object of the present invention to provide novel insect GPCR nucleic acids and polypeptides, and novel methods relating thereto. This object is achieved in whole or in part by the present invention.

[0041] An object of the invention having been stated above, other objects and advantages of the present invention will become apparent to those skilled in the art after a study of the following description of the invention, and non-limiting Examples.

### Brief Description of Sequences in the Sequence Listing

[0042] Odd-numbered SEQ ID NOs:1-107 are nucleotide sequences encoding GPCRs described in Table 1.

[0043] Even-numbered SEQ ID NOs:2-108 are protein sequences encoded by the immediately preceding nucleotide sequence, e.g., SEQ ID NO:2 is the protein encoded by the nucleotide sequence of SEQ ID NO:1, SEQ ID NO:4 is the protein encoded by the nucleotide sequence of SEQ ID NO:3, etc.

[0044] SEQ ID NO:109 is an octopamine forward degenerate primer.

[0045] SEQ ID NO:110 is an octopamine reverse degenerate primer.

[0046] SEQ ID NO:111 is a 5′ RACE primer.

[0047] SEQ ID NO:112 is a 3′ RACE primer.

TABLE 1
Sequence Listing Summary

| SEQ ID NOS. | Inventor's Reference |
|---|---|
| 1-2 | Adenosine_99E1 |
| 3-4 | Allatostatin_3E1 |
| 5-6 | Gastrin_2C3 |
| 7-8 | wormlike_4F9 |
| 9-10 | Dopamine_6D7 |
| 11-12 | Lymnokinin_11D9 |
| 13-14 | mthlike1_15A |
| 15-16 | gastrin_17E3 |
| 17-18 | CCK-X_26A1 |
| 19-20 | neuroYY_26B1 |
| 21-22 | GRHR_27A2 |
| 23-24 | Bombesin_42A10 |
| 25-26 | Latrophillin_44D4 |
| 27-28 | wormlike_47E |
| 29-30 | Calcitonin_49F9 |
| 31-32 | DiureticHor2_51A1 |
| 33-34 | mthlike3_54B16 |
| 35-36 | bombesin_54D4 |
| 37-38 | 5-HT1A_56A |
| 39-40 | mAcR-60C |
| 41-42 | Adrenergic_60D1 |
| 43-44 | mthlike9_61C |
| 45-46 | mthlike10_61C1 |
| 47-48 | wormlike_62 |
| 49-50 | wormlike_63A3 |
| 51-52 | adrenergic_64C |
| 53-54 | lymnokinin_64D3 |
| 55-56 | mthlike2_64D4 |
| 57-58 | GRHR_69B |
| 59-60 | somatostatin_75C1 |
| 61-62 | NeuroYlike_77A1 |
| 63-64 | Secretagogue_79A |
| 65-66 | 5-HT2_82C4 |
| 67-68 | NeuroYYlike_83 |
| 69-70 | mAcChR_84E8 |
| 71-72 | Takr-86C_86C3 |
| 73-74 | mthlike5_87A |
| 75-76 | GrowthHormone_87F1 |
| 77-78 | neurotensin_88B1 |
| 79-80 | DopR_88B1 |
| 81-82 | Octopamine_90C2 |
| 83-84 | FSHlike_96E5 |
| 85-86 | Histamine_97B |
| 87-88 | NeuropepYR_97E1 |
| 89-90 | Galanin_98E2 |
| 91-92 | Takr-99D_99D1 |
| 93-94 | 5-HT7_100A2 |
| 95-96 | He6Receptor_100B1 |
| 97-98 | Fsh 90c2 |
| 99-100 | He6Receptor2 |
| 101-102 | Prostaglandin 74F1 |
| 103-104 | Oct-TyrR 79D1 |
| 105-106 | Octopamine type 2 Heliothis |
| 107-108 | Diuretic Hormone Manduca |
| 109 | Octopamine forward degenerate |
| | primer |
| 110 | Octopamine reverse degererate |
| | primer |
| 111 | 5′ RACE Primer |
| 112 | 3′ RACE primer |

### DETAILED DESCRIPTION OF THE INVENTION

[0048] I. Definitions

[0049] While the following terms are believed to be well understood by one of ordinary skill in the art, the following definitions are set forth to facilitate explanation of the invention.

[0050] The term “nucleic acid molecule” refers to deoxyribonucleotides or ribonucleotides and polymers thereof in either single- or double-stranded form. Unless specifically limited, the term encompasses nucleic acids containing known analogues of natural nucleotides which have similar properties as the reference natural nucleic acid. Unless otherwise indicated, a particular nucleotide sequence also implicitly encompasses conservatively modified variants thereof (e.g., degenerate codon substitutions), complementary sequences, subsequences, elongated sequences, as well as the sequence explicitly indicated. The terms “nucleic acid molecule” or “nucleotide sequence” can also be used in place of “gene”, “cDNA”, or “mRNA”. Nucleic acids can be derived from any source, including any organism.

[0051] The term “isolated”, as used in the context of a nucleic acid molecule, indicates that the nucleic acid molecule exists apart from its native environment and is not a product of nature. An isolated DNA molecule can exist in a purified form or can exist in a non-native environment such as a transgenic host cell.

[0052] The term “purified”, when applied to a nucleic acid, denotes that the nucleic acid is essentially free of other cellular components with which it is associated in the natural state. Preferably, a purified nucleic acid molecule is a homogeneous dry or aqueous solution. The term “purified” denotes that a nucleic acid gives rise to essentially one band in an electrophoretic gel. Particularly, it means that the nucleic acid is at least about 50% pure, more preferably at least about 85% pure, and most preferably at least about 99% pure.

[0053] The term “substantially identical”, in the context of two nucleotide sequences, refers to two or more sequences or subsequences that have at least 60%, preferably about 70%, more preferably about 80%, more preferably about 90-95%, and most preferably about 99% nucleotide identity, when compared and aligned for maximum correspondence, as measured using one of the following sequence comparison algorithms (described herein below under the heading “Nucleotide and Amino Acid Sequence Comparisons” or by visual inspection. Preferably, the substantial identity exists in nucleotide sequences of at least 50 residues, more preferably in nucleotide sequence of at least about 100 residues, more preferably in nucleotide sequences of at least about 150 residues, and most preferably in nucleotide sequences comprising complete coding sequences. In one aspect, polymorphic sequences can be substantially identical sequences. The term “polymorphic” refers to the occurrence of two or more genetically determined alternative sequences or alleles in a population. An allelic difference can be as small as one base pair.

[0054] Another indication that two nucleotide sequences are substantially identical is that the two molecules specifically or substantially hybridize to each other under stringent conditions. In the context of nucleic acid hybridization, two nucleic acid sequences being compared can be designated a “probe” and a “target”. A “probe” is a reference nucleic acid molecule, and a “‘target” is a test nucleic acid molecule, often found within a heterogeneous population of nucleic acid molecules. A “target sequence” is synonymous with a “test sequence”.

[0055] A preferred nucleotide sequence employed for hybridization studies or assays includes probe sequences that are complementary to or mimic at least an about 14 to 40 nucleotide sequence of a nucleic acid molecule of the present invention. Preferably, probes comprise 14 to 20 nucleotides, or even longer where desired, such as 30, 40, 50, 60, 100, 200, 300, or 500 nucleotides or up to the full length of any of those set forth as odd numbered sequences SEQ ID NOs:1-107. Such fragments can be readily prepared by, for example, directly synthesizing the fragment by chemical synthesis, by application of nucleic acid amplification technology, or by introducing selected sequences into recombinant vectors for recombinant production.

[0056] The phrase “hybridizing specifically to” refers to the binding, duplexing, or hybridizing of a molecule only to a particular nucleotide sequence under stringent conditions when that sequence is present in a complex nucleic acid mixture (e.g., total cellular DNA or RNA).

[0057] The phrase “hybridizing substantially to” refers to complementary hybridization between a probe nucleic acid molecule and a target nucleic acid molecule and embraces minor mismatches that can be accommodated by reducing the stringency of the hybridization media to achieve the desired hybridization.

[0058] “Stringent hybridization conditions” and “stringent hybridization wash conditions” in the context of nucleic acid hybridization experiments such as Southern and Northern blot analysis are both sequence- and environment-dependent. Longer sequences hybridize specifically at higher temperatures. An extensive guide to the hybridization of nucleic acids is found in Tijssen (1993) Laboratory Techniques in Biochemistry and Molecular Biology—Hybridization with Nucleic Acid Probes, part I chapter 2, Elsevier, New York, N.Y. Generally, highly stringent hybridization and wash conditions are selected to be about 5° C. lower than the thermal melting point (Tₘ) for the specific sequence at a defined ionic strength and pH. Typically, under “stringent conditions” a probe will hybridize specifically to its target subsequence, but to no other sequences.

[0059] The Tₘ is the temperature (under defined ionic strength and pH) at which 50% of the target sequence hybridizes to a perfectly matched probe. Very stringent conditions are selected to be equal to the Tₘ for a particular probe. An example of stringent hybridization conditions for Southern or Northern Blot analysis of complementary nucleic acids having more than about 100 complementary residues is overnight hybridization in 50% formamide with 1 mg of heparin at 42° C. An example of highly stringent wash conditions is 15 minutes in 0.1×SSC, SM NaCl at 65° C. An example of stringent wash conditions is 15 minutes in 0.2×SSC buffer at 65° C. (See Sambrook et al., eds (1989) Molecular Cloning: A Laboratory Manual, Cold Spring Harbor Laboratory Press, Cold Spring Harbor, N.Y. for a description of SSC buffer). Often, a high stringency wash is preceded by a low stringency wash to remove background probe signal. An example of medium stringency wash conditions for a duplex of more than about 100 nucleotides, is 15 minutes in 1×SSC at 45° C. An example of low stringency wash for a duplex of more than about 100 nucleotides, is 15 minutes in 4-6×SSC at 40° C. For short probes (e.g., about 10 to 50 nucleotides), stringent conditions typically involve salt concentrations of less than about 1M Na⁺ ion, typically about 0.01 to 1M Na⁺ ion concentration (or other salts) at pH 7.0-8.3, and the temperature is typically at least about 30° C. Stringent conditions can also be achieved with the addition of destabilizing agents such as formamide. In general, a signal to noise ratio of 2-fold (or higher) than that observed for an unrelated probe in the particular hybridization assay indicates detection of a specific hybridization.

[0060] The following are examples of hybridization and wash conditions that can be used to clone homologous nucleotide sequences that are substantially identical to reference nucleotide sequences of the present invention: a probe nucleotide sequence preferably hybridizes to a target nucleotide sequence in 7% sodium dodecyl sulfate (SDS), 0.5M NaPO₄, 1 mM EDTA at 50° C. followed by washing in 2×SSC, 0.1% SDS at 50°c; more preferably, a probe and target sequence hybridize in 7% sodium dodecyl sulfate (SDS), 0.5M NaPO₄, 1 mM EDTA at 50° C. followed by washing in 1×SSC, 0.1% SDS at 50° C.; more preferably, a probe and target sequence hybridize in 7% sodium dodecyl sulfate (SDS), 0.5M NaPO₄, 1 mM EDTA at 50° C. followed by washing in 0.5×SSC, 0.1% SDS at 50° C.; more preferably, a probe and target sequence hybridize in 7% sodium dodecyl sulfate (SDS), 0.5M NaPO₄, 1 mM EDTA at 50° C. followed by washing in 0.1×SSC, 0.1% SDS at 50° C.; more preferably, a probe and target sequence hybridize in 7% sodium dodecyl sulfate (SDS), 0.5M NaPO₄, 1 mM EDTA at 50° C. followed by washing in 0.1×SSC, 0.1% SDS at 65° C.

[0061] A further indication that two nucleic acid sequences are substantially identical is that proteins encoded by the nucleic acids are substantially identical, share an overall three-dimensional structure, are biologically functional equivalents, or are immunologically cross-reactive. These terms are defined further under the heading “Polypeptides” herein below. Nucleic acid molecules that do not hybridize to each other under stringent conditions are still substantially identical if the corresponding proteins are substantially identical. This can occur, for example, when two nucleotide sequences are significantly degenerate as permitted by the genetic code.

[0062] The term “conservatively substituted variants” refers to nucleic acid sequences having degenerate codon substitutions wherein the third position of one or more selected (or all) codons is substituted with mixed-base and/or deoxyinosine residues (Batzer et al. (1991) Nuc Acids Res 19:5081; Ohtsuka et al. (1985) J Biol Chem 260:2605-2608; Rossolini et al. (1994) Mol Cell Probes 8:91-98).

[0063] The term “subsequence” refers to a sequence of nucleic acids that comprises a part of a longer nucleic acid sequence. An exemplary subsequence is a probe, described herein above, or a primer. The term “primer” as used herein refers to a contiguous sequence comprising about 8 or more deoxyribonucleotides or ribonucleotides, preferably 10-20 nucleotides, and more preferably 20-30 nucleotides of a selected nucleic acid molecule. The primers of the invention encompass oligonucleotides of sufficient length and appropriate sequence so as to provide initiation of polymerization on a nucleic acid molecule of the present invention.

[0064] The term “elongated sequence” refers to an addition of nucleotides (or other analogous molecules) incorporated into the nucleic acid. For example, a polymerase (e.g., a DNA polymerase) can add sequences at the 3′ terminus of the nucleic acid molecule. In addition, the nucleotide sequence can be combined with other DNA sequences, such as promoters, promoter regions, enhancers, polyadenylation signals, intronic sequences, additional restriction enzyme sites, multiple cloning sites, and other coding segments.

[0065] The term “complementary sequences”, as used herein, indicates two nucleotide sequences that comprise antiparallel nucleotide sequences capable of pairing with one another upon formation of hydrogen bonds between base pairs. As used herein, the term “complementary sequences” means nucleotide sequences which are substantially complementary, as can be assessed by the same nucleotide comparison set forth above, or is defined as being capable of hybridizing to the nucleic acid segment in question under relatively stringent conditions such as those described herein. A particular example of a complementary nucleic acid segment is an antisense oligonucleotide.

[0066] The term “gene” refers broadly to any segment of DNA associated with a biological function. A gene encompasses sequences including but not limited to a coding sequence, a promoter region, a cis-regulatory sequence, a non-expressed DNA segment that is a specific recognition sequence for regulatory proteins, a non-expressed DNA segment that contributes to gene expression, a DNA segment designed to have desired parameters, or combinations thereof. A gene can be obtained by a variety of methods, including cloning from a biological sample, synthesis based on known or predicted sequence information, and recombinant derivation of an existing sequence.

[0067] The term “gene expression” generally refers to the cellular processes by which a biologically active polypeptide is produced from a DNA sequence.

[0068] The present invention also encompasses chimeric genes comprising the disclosed GPCR sequences. The term “chimeric gene”, as used herein, refers to a promoter region operatively linked to a GPCR coding sequence, a nucleotide sequence producing an antisense RNA molecule, a RNA molecule having tertiary structure, such as a hairpin structure, or a double-stranded RNA molecule.

[0069] The term “operatively linked”, as used herein, refers to a promoter region that is connected to a nucleotide sequence in such a way that the transcription of that nucleotide sequence is controlled and regulated by that promoter region. Techniques for operatively linking a promoter region to a nucleotide sequence are known in the art.

[0070] The terms “heterologous gene”, “heterologous DNA sequence”, “heterologous nucleotide sequence”, “exogenous nucleic acid molecule”, or “exogenous DNA segment”, as used herein, each refer to a sequence that originates from a source foreign to an intended host cell or, if from the same source, is modified from its original form. Thus, a heterologous gene in a host cell includes a gene that is endogenous to the particular host cell but has been modified, for example by mutagenesis or by isolation from native cis-regulatory sequences. The terms also include non-naturally occurring multiple copies of a naturally occurring nucleotide sequence. Thus, the terms refer to a DNA segment that is foreign or heterologous to the cell, or homologous to the cell but in a position within the host cell nucleic acid wherein the element is not ordinarily found.

[0071] The term “transcription factor” generally refers to a protein that modulates gene expression by interaction with the cis-regulatory element and cellular components for transcription, including RNA Polymerase, Transcription Associated Factors (TAFs), chromatin-remodeling proteins, and any other relevant protein that impacts gene transcription.

[0072] The present invention further includes vectors comprising the disclosed nuclear sequences, including plasmids, cosmids, and viral vectors. The term “vector”, as used herein refers to a DNA molecule having sequences that enable its replication in a compatible host cell. A vector also includes nucleotide sequences to permit ligation of nucleotide sequences within the vector, wherein such nucleotide sequences are also replicated in a compatible host cell. A vector can also mediate recombinant production of a GPCR polypeptide, as described further herein below. A preferred host cell is a bacterial cell, an insect cell, a plant cell or mammalian cell.

[0073] Nucleic acids of the present invention can be cloned, synthesized, recombinantly altered, mutagenized, or combinations thereof. Standard recombinant DNA and molecular cloning techniques used to isolate nucleic acids are known in the art. Exemplary, non-limiting methods are described by Sambrook et al., eds (1989) Molecular Cloning, Cold Spring Harbor Laboratory Press, Cold Spring Harbor, N.Y.; by Silhavy et al. (1984) Experiments with Gene Fusions, Cold Spring Harbor Laboratory Press, Cold Spring Harbor, N.Y.; Sambrook, (2001) Molecular Cloning: a Laboratory Manual (3^{rd} ed), Cold Spring Harbor Laboratory Press, Cold Spring Harbor, N.Y.; by Ausubel et al. (1992) Current Protocols in Molecular Biology, John Wylie and Sons, Inc., New York, N.Y.; and by Glover, ed (1985) DNA Cloning: A Practical Approach, MRL Press, Ltd., Oxford, United Kingdom. Site-specific mutagenesis to create base pair changes, deletions, or small insertions are also known in the art as exemplified by publications. See, e.g., Adelman et al. (1983) DNA 2:183; Sambrook et al., eds (1989) Molecular Cloning, Cold Spring Harbor Laboratory Press, Cold Spring Harbor, N.Y.

[0074] Sequences detected by methods of the invention can be detected, subcloned, sequenced, and further evaluated by any measure known in the art using any method usually applied to the detection of a specific DNA sequence including but not limited to dideoxy sequencing, PCR, oligomer restriction (Saiki et al. (1985) Bio/Technology 3:1008-1012), allele-specific oligonucleotide (ASO) probe analysis (Conner et al. (1983) Proc Natl Acad Sci USA 80:278), and oligonucleotide ligation assays (OLAs) (Landgren et al. (1988) Science 241:1007). See also Landgren et al. (1988) Science 242:229-237.

[0075] The polypeptides provided by the present invention include the isolated polypeptides set forth as even sequences of SEQ ID NOs:2-108; polypeptides substantially identical to even numbered sequences of SEQ ID NOs:2-108; GPCR polypeptide fragments (preferably biologically functional fragments, e.g. the domains described herein), fusion proteins comprising the disclosed GPCR amino acid sequences, biologically functional analogs, and polypeptides that cross-react with an antibody that specifically recognizes a disclosed GPCR polypeptide.

[0076] The term “isolated”, as used in the context of a polypeptide, indicates that the polypeptide exists apart from its native environment and is not a product of nature. An isolated polypeptide can exist in a purified form or can exist in a non-native environment such as, for example, in a transgenic host cell.

[0077] The term “purified”, when applied to a polypeptide, denotes that the polypeptide is essentially free of other cellular components with which it is associated in the natural state. Preferably, a polypeptide is a homogeneous solid or aqueous solution. Purity and homogeneity are typically determined using analytical chemistry techniques such as polyacrylamide gel electrophoresis or high performance liquid chromatography. A polypeptide which is the predominant species present in a preparation is substantially purified. The term “purified” denotes that a polypeptide gives rise to essentially one band in an electrophoretic gel. Particularly, it means that the polypeptide is at least about 50% pure, more preferably at least about 85% pure, and most preferably at least about 99% pure.

[0078] The term “substantially identical” in the context of two or more polypeptide sequences is measured as polypeptide sequences having about 35%, or 45%, or preferably from 45-55%, or more preferably 55-65% of identical or functionally equivalent amino acids. Even more preferably, two or more “substantially identical” polypeptide sequences will have about 70%, or even more preferably about 80%, still more preferably about 90%, still more preferably about 95%, and most preferably about 99% identical or functionally equivalent amino acids. Percent “identity” and methods for determining identity are defined herein below under the heading “Nucleotide and Amino Acid Sequence Comparisons”.

[0079] Substantially identical polypeptides also encompass two or more polypeptides sharing a conserved three-dimensional structure. Computational methods can be used to compare structural representations, and structural models can be generated and easily tuned to identify similarities around important active sites or ligand binding sites. See Henikoff et al. (2000) Electrophoresis 21(9):1700-1706; Huang et al. (2000) Pac Symp Biocomput 230-241; Saqi et al. (1999) Bioinformatics 15(6):521-522; and Barton (1998) Acta Crystallogr D Biol Crystallogr 54:1139-1146.

[0080] The term “functionally equivalent” in the context of amino acid sequences is known in the art and is based on the relative similarity of the amino acid side-chain substituents. See Henikoff & Henikoff (2000) Adv Protein Chem 54:73-97. Relevant factors for consideration include side-chain hydrophobicity, hydrophilicity, charge, and size. For example, arginine, lysine, and histidine are all positively charged residues; that alanine, glycine, and serine are all of similar size; and that phenylalanine, tryptophan, and tyrosine all have a generally similar shape. By this analysis, described further herein below, arginine, lysine, and histidine; alanine, glycine, and serine; and phenylalanine, tryptophan, and tyrosine; are defined herein as biologically functional equivalents.

[0081] In making biologically functional equivalent amino acid substitutions, the hydropathic index of amino acids can be considered. Each amino acid has been assigned a hydropathic index on the basis of their hydrophobicity and charge characteristics, these are: isoleucine (+4.5); valine (+4.2); leucine (+3.8); phenylalanine (+2.8); cysteine (+2.5); methionine (+1.9); alanine (+1.8); glycine (−0.4); threonine (−0.7); serine (−0.8); tryptophan (−0.9); tyrosine (−1.3); proline (−1.6); histidine (−3.2); glutamate (−3.5); glutamine (−3.5); aspartate (−3.5); asparagine (−3.5); lysine (−3.9); and arginine (−4.5).

[0082] The importance of the hydropathic amino acid index in conferring interactive biological function on a protein is generally understood in the art (Kyte et al. (1982) J Mol Biol 157:105). It is known that certain amino acids can be substituted for other amino acids having a similar hydropathic index or score and still retain a similar biological activity. In making changes based upon the hydropathic index, the substitution of amino acids whose hydropathic indices are within ±2 of the original value is preferred, those which are within ±1 of the original value are particularly preferred, and those within ±0.5 of the original value are even more particularly preferred.

[0083] It is also understood in the art that the substitution of like amino acids can be made effectively on the basis of hydrophilicity. U.S. Pat. No. 4,554,101 states that the greatest local average hydrophilicity of a protein, as governed by the hydrophilicity of its adjacent amino acids, correlates with its immunogenicity and antigenicity, e.g., with a biological property of the protein. It is understood that an amino acid can be substituted for another having a similar hydrophilicity value and still obtain a biologically equivalent protein.

[0084] As detailed in U.S. Pat. No. 4,554,101, the following hydrophilicity values have been assigned to amino acid residues: arginine (+3.0); lysine (+3.0); aspartate (+3.0±1); glutamate (+3.0±1); serine (+0.3); asparagine (+0.2); glutamine (+0.2); glycine (0); threonine (−0.4); proline (−0.5±1); alanine (−0.5); histidine (−0.5); cysteine (−1.0); methionine (−1.3); valine (−1.5); leucine (−1.8); isoleucine (−1.8); tyrosine (−2.3); phenylalanine (−2.5); tryptophan (−3.4).

[0085] In making changes based upon similar hydrophilicity values, the substitution of amino acids whose hydrophilicity values are within ±2 of the original value is preferred, those which are within ±1 of the original value are particularly preferred, and those within ±0.5 of the original value are even more particularly preferred.

[0086] The present invention also encompasses GPCR polypeptide fragments or functional portions of a GPCR polypeptide. Such functional portion need not comprise all or substantially all of the amino acid sequence of a native GPCR gene product. The term “functional” includes any biological activity or feature of GPCR, including immunogenicity.

[0087] The present invention also includes longer sequences of a GPCR polypeptide, or portion thereof. For example, one or more amino acids can be added to the N-terminus or C-terminus of a GPCR polypeptide. Fusion proteins comprising GPCR polypeptide sequences are also provided within the scope of the present invention. Methods of preparing such proteins are known in the art.

[0088] The present invention also encompasses functional analogs of a GPCR polypeptide. Functional analogs share at least one biological function with a GPCR polypeptide. An exemplary function is immunogenicity. In the context of amino acid sequence, biologically functional analogs, as used herein, are peptides in which certain, but not most or all, of the amino acids can be substituted. Functional analogs can be created at the level of the corresponding nucleic acid molecule, altering such sequence to encode desired amino acid changes. In one embodiment, changes can be introduced to improve a biological function of the polypeptide, e.g., to improve the antigenicity of the polypeptide. In another embodiment, a GPCR polypeptide sequence is varied so as to assess the activity of a mutant GPCR polypeptide.

[0089] The present invention also encompasses recombinant production of the disclosed GPCR polypeptides. Briefly, a nucleic acid sequence encoding a GPCR polypeptide, or portion thereof, is cloned into an expression cassette, the cassette is introduced into a host organism, where it is recombinantly produced.

[0090] The term “expression cassette” as used herein means a DNA sequence capable of directing expression of a particular nucleotide sequence in an appropriate host cell, comprising a promoter operatively linked to the nucleotide sequence of interest which is operatively linked to termination signals. It also typically comprises sequences required for proper translation of the nucleotide sequence. The expression cassette comprising the nucleotide sequence of interest can be chimeric. The expression cassette can also be one which is naturally occurring but has been obtained in a recombinant form useful for heterologous expression.

[0091] The expression of the nucleotide sequence in the expression cassette can be under the control of a constitutive promoter or an inducible promoter which initiates transcription only when the host cell is exposed to some particular external stimulus. Exemplary promoters include Simian virus 40 early promoter, a long terminal repeat promoter from retrovirus, an action promoter, a heat shock promoter, and a metallothien protein. In the case of a multicellular organism, the promoter and promoter region can direct expression to a particular tissue or organ or stage of development. Suitable expression vectors which can be used include, but are not limited to, the following vectors or their derivatives: viruses such as vaccinia virus or adenovirus, baculovirus vectors, yeast vectors, bacteriophage vectors (e.g., lambda phage), plasmid and cosmid DNA vectors, and transposon-mediated transformation vectors.

[0092] The term “host cell”, as used herein, refers to a cell into which a heterologous nucleic acid molecule has been introduced. Transformed cells, tissues, or organisms are understood to encompass not only the end product of, a transformation process, but also transgenic progeny thereof.

[0093] A host cell strain can be chosen which modulates the expression of the inserted sequences, or modifies and processes the gene product in the specific fashion desired. For example, different host cells have characteristic and specific mechanisms for the translational and post-transactional processing and modification (e.g., glycosylation, phosphorylation of proteins). Appropriate cell lines or host systems can be chosen to ensure the desired modification and processing of the foreign protein expressed. Expression in a bacterial system can be used to produce a non-glycosylated core protein product. Expression in yeast will produce a glycosylated product. Expression in insect cells can be used to ensure “native” glycosylation of a heterologous protein.

[0094] Expression constructs are transfected into a host cell by any standard method, including electroporation, calcium phosphate precipitation, DEAE-Dextran transfection, liposome-mediated transfection, transposon-mediated transformation and infection using a retrovirus. The GPCR-encoding nucleotide sequence carried in the expression construct can be stably integrated into the genome of the host or it can be present as an extrachromosomal molecule.

[0095] Isolated polypeptides and recombinantly produced polypeptides can be purified and characterized using a variety of standard techniques that are known to the skilled artisan. See, e.g., Ausubel et al. (1992) Current Protocols in Molecular Biology, John Wylie & Sons, Inc., New York, N.Y.; Bodanszky, et al. (1976) Peptide Synthesis, John Wiley and Sons, Second Edition, New York, N.Y.; and Zimmer et al. (1993) Peptides, pp. 393-394, ESCOM Science Publishers, B. V.

[0096] I.C. Nucleotide and Amino Acid Sequence Comparisons The terms “identical” or percent “identity” in the context of two or more nucleotide or polypeptide sequences, refer to two or more sequences or subsequences that are the same or have a specified percentage of amino acid residues or nucleotides that are the same, when compared and aligned for maximum correspondence, as measured using one of the sequence comparison algorithms disclosed herein or by visual inspection.

[0097] The term “substantially identical” in regards to a nucleotide or polypeptide sequence means that a particular sequence varies from the sequence of a naturally occurring sequence by one or more deletions, substitutions, or additions, the net effect of which is to retain at least some of biological activity of the natural gene, gene product, or sequence. Such sequences include “mutant” sequences, or sequences wherein the biological activity is altered to some degree but retains at least some of the original biological activity. The term “naturally occurring”, as used herein, is used to describe a composition that can be found in nature as distinct from being artificially produced by man. For example, a protein or nucleotide sequence present in an organism, which can be isolated from a source in nature and which has not been intentionally modified by man in the laboratory, is naturally occurring.

[0098] For sequence comparison, typically one sequence acts as a reference sequence to which test sequences are compared. When using a sequence comparison algorithm, test and reference sequences are entered into a computer program, subsequence coordinates are designated if necessary, and sequence algorithm program parameters are selected. The sequence comparison algorithm then calculates the percent sequence identity for the designated test sequence(s) relative to the reference sequence, based on the selected program parameters.

[0099] Optimal alignment of sequences for comparison can be conducted, e.g., by the local homology algorithm of Smith & Waterman (1981) Adv Appl Math 2:482, by the homology alignment algorithm of Needleman & Wunsch (1970) J Mol Biol 48:443, by the search for similarity method of Pearson & Lipman (1988) Proc Natl Acad Sci USA 85:2444-2448, by computerized implementations of these algorithms (GAP, BESTFIT, FASTA, and TFASTA in the Wisconsin Genetics Software Package, Genetics Computer Group, Madison, Wis.), or by visual inspection. See generally, Ausubel et al. (1992) Current Protocols in Molecular Biology, John Wylie & Sons, Inc., New York, N.Y.

[0100] A preferred algorithm for determining percent sequence identity and sequence similarity is the BLAST algorithm, which is described in Altschul et al. (1990) J Mol Biol 215: 403-410. Software for performing BLAST analyses is publicly available through the National Center for Biotechnology Information (http://www.ncbi.nlm.nih.gov/). This algorithm involves first identifying high scoring sequence pairs (HSPs) by identifying short words of length W in the query sequence, which either match or satisfy some positive-valued threshold score T when aligned with a word of the same length in a database sequence. T is referred to as the neighborhood word score threshold. These initial neighborhood word hifs act as seeds for initiating searches to find longer HSPs containing them. The word hits are then extended in both directions along each sequence for as far as the cumulative alignment score can be increased. Cumulative scores are calculated using, for nucleotide sequences, the parameters M (reward score for a pair of matching residues; always >0) and N (penalty score for mismatching residues; always <0). For amino acid sequences, a scoring matrix is used to calculate the cumulative score. Extension of the word hits in each direction are halted when the cumulative alignment score falls off by the quantity X from its maximum achieved value, the cumulative score goes to zero or below due to the accumulation of one or more negative-scoring residue alignments, or the end of either sequence is reached. The BLAST algorithm parameters W, T, and X determine the sensitivity and speed of the alignment. The BLASTN program (for nucleotide sequences) uses as defaults a wordlength W=11, an expectation E=10, a cutoff of 100, M=5, N=−4, and a comparison of both strands. For amino acid sequences, the BLASTP program uses as defaults a wordlength (W) of 3, an expectation (E) of 10, and the BLOSUM62 scoring matrix. See Henikoff & Henikoff (1989) Proc Natl Acad Sci USA 89:10915.

[0101] In addition to calculating percent sequence identity, the BLAST algorithm also performs a statistical analysis of the similarity between two sequences. See, e.g., Karlin & Altschul (1993) Proc Natl Acad Sci USA 90:5873-5887. One measure of similarity provided by the BLAST algorithm is the smallest sum probability (P(N)), which provides an indication of the probability by which a match between two nucleotide or amino acid sequences would occur by chance. For example, a test nucleic acid sequence is considered similar to a reference sequence if the smallest sum probability in a comparison of the test nucleic acid sequence to the reference nucleic acid sequence is less than about 0.1, more preferably less than about 0.01, and most preferably less than about 0.001.

[0102] I.D. Antibodies

[0103] Also provided is an antibody that specifically binds an insect GPCR polypeptide of the present invention. The term “antibody” indicates an immunoglobulin protein, or functional portion thereof, including a polyclonal antibody, a monoclonal antibody, a chimeric antibody, a single chain antibody, Fab fragments, and a Fab expression library. “Functional portion” refers to the part of the protein that binds a molecule of interest. In a preferred embodiment, an antibody of the invention is a monoclonal antibody. Techniques for preparing and characterizing antibodies are known in the art. See, e.g., Harlow & Lane (1988) Antibodies: A Laboratory Manual, Cold Spring Harbor Laboratory Press, Cold Spring Harbor, N.Y. A monoclonal antibody of the present invention can be readily prepared through use of well-known techniques such as the hybridoma techniques exemplified in U.S. Pat. No. 4,196,265 and the phage-displayed techniques disclosed in U.S. Pat. No. 5,260,203.

[0104] The phrase “specifically (or selectively) binds to an antibody”, or “specifically (or selectively) immunoreactive with”, when referring to a protein or peptide, refers to a binding reaction which is determinative of the presence of the protein in a heterogeneous population of proteins and other biological materials. Thus, under designated immunoassay conditions, the specified antibodies bind to a particular protein and do not show significant binding to other proteins present in the sample. Specific binding to an antibody under such conditions can require an antibody that is selected based on its specificity for a particular protein. For example, antibodies raised to a protein with an amino acid sequence encoded by any of the nucleic acid sequences of the invention can be selected to obtain antibodies specifically immunoreactive with that protein and not with unrelated proteins.

[0105] The use of a molecular cloning approach to generate antibodies, particularly monoclonal antibodies, and more particularly single chain monoclonal antibodies, are also provided. The production of single chain antibodies has been described in the art. See, e.g., U.S. Pat. No. 5,260,203. For this approach, combinatorial immunoglobulin phagemid libraries are prepared from RNA isolated from the spleen of the immunized animal, and phagemids expressing appropriate antibodies are selected by panning on tissue that expresses the polypeptide. The advantages of this approach over conventional hybridoma techniques are that approximately 10⁴ times as many antibodies can be produced and screened in a single round, and that new specificities are generated by heavy (H) and light (L) chain combinations in a single chain, which further increases the chance of finding appropriate antibodies. Thus, an antibody of the present invention, or a “derivative” of an antibody of the present invention, pertains to a single polypeptide chain binding molecule which has binding specificity and affinity substantially identical to the binding specificity and affinity of the light and heavy chain aggregate variable region of an antibody described herein.

[0106] The term “immunochemical reaction”, as used herein, refers to any of a variety of immunoassay formats used to detect antibodies specifically bound to a particular protein, including but not limited to competitive and non-competitive assay systems using techniques such as radioimmunoassays, ELISA (enzyme linked immunosorbent assay), “sandwich” immunoassays, immunoradiometric assays, gel diffusion precipitation reactions, immunodiffusion assays, in situ immunoassays (e.g., using colloidal gold, enzyme or radioisotope labels), Western blot analysis, precipitation reactions, agglutination assays (e.g., gel agglutination assays, hemagglutination assays), complement fixation assays, immunofluorescence assays, protein A assays, and immunoelectrophoresis assays, etc. See Harlow & Lane (1988) Antibodies: A Laboratory Manual, Cold Spring Harbor Laboratory Press, Cold Spring Harbor, N.Y. for a description of immunoassay formats and conditions.

[0107] I.E. Modulating Compounds

[0108] The term “agonist” is used throughout this application to indicate any peptide or non-peptidyl compound which increases the activity of any of the receptors of the subject invention. The term “antagonist” is used throughout this application to indicate any peptide or non-peptidyl compound which decreases the activity of any of the receptors of the subject invention.

[0109] I.F. Transgenic Organisms

[0110] It is also within the scope of the present invention to prepare a transgenic organism to express a transgene comprising nucleic acid sequences of the present invention. The term “transgenic organism”, indicates an organism comprising a germline insertion of a heterologous nucleic acid. A transgenic organism can be an animal or a plant. Transgenic organisms of the present invention are understood to encompass not only the end product of a transformation method, but also transgenic progeny thereof.

[0111] The term “transgene”, as used herein indicates a heterologous nucleic acid molecule that has been transformed into a host cell. For intended use in the creation of a transgenic organism, the transgene can include genomic sequences of the host organism at a selected locus or site of transgene integration to mediate a homologous recombination event. A transgene further comprises nucleic acid sequences of interest, for example a targeted modification of the gene residing within the locus, a reporter gene, or a expression cassette, each defined herein above.

[0112] II. G Protein-Coupled Receptors

[0113] II.A. Conserved Features

[0114] GPCRs can be subdivided into five different classes based on sequence homology and named according to their ligands (see www.gpcr.org). Class A GPCRs, sometimes called “Rhodopsin Like” receptors include amine receptors such as dopamine and octopamine, peptide receptors, rhodopsins, olfactory and nucleotide-like receptors among others. Class B GPCRs, known as “secretin Like” include calcitonin, diuretic hormone and secretin receptors in addition to others. Latrophilin and Methuselah are Class B receptors as well. The Class C Receptors or “metabotropic glutamate/pheromone” group includes metabotropic glutamate, extracellular calcium-sensing, and GABA-B receptors. Classes D and E are much smaller and are the “Fungal pheromone” and “cAMP receptors” groups respectively.

[0115] II.B. Identification of Novel Insect G Protein-Coupled Receptors

[0116] The present invention provides novel Drosophila, Heliothis and Manduca GPCR nucleic acid and polypeptide sequences. Preferably, a Drosophila, Heliothis or Manduca GPCR nucleic acid molecule of the present invention comprises the sequence set forth as any one of the odd numbered sequences of SEQ ID NOs:1-119; or a nucleic acid molecule that is substantially identical to any one of odd numbered sequences of SEQ ID NOs:1-119. Also preferably, a GPCR polypeptide of the present invention comprises an amino acid sequence set forth as any one of even numbered sequences of SEQ ID NOs:2-120; or a polypeptide that is substantially identical to any one of even numbered sequences of SEQ ID NOs:2-120.

[0117] To identify new Drosophila proteins, a database of predicted proteins (referred to herein as “the GeneMark database”) was assembled using the GeneMark program (Borodovsky & McIninch (1993) Computers & Chemistry 17:123-133) and template 50 kilobase genomic sequence scaffolds generated by Celera Corp. (Rockville, Md.). A second predicted protein database generated by Celera using an alternative protein prediction program was also used (referred to herein as “the Celera database”).

[0118] Eleven Class A GPCRs from vertebrate (either human or mouse) representing all sub-catagories of Class A were used to BLAST the GeneMark database and the Celera database. Twelve Class B and two Class C GPCRs were also used to BLAST the same databases. The results of the BLAST searches were examined and predicted proteins likely to be GPCRs were identified. A highly conserved region of cytoplasmic loop two was then used to generate Hidden Markov Model (HMM) profiles for Class A and Class B and this profile HMM was used to query the GeneMark and Celera databases to identify any Drosophila GPCRs that do not have a vertebrate homolog. The GeneMark and Celera protein predictions for each novel Drosophila GPCR were then BLASTED against the non-redundant set of GenBank. The prediction with the lower E-value score was identified and judged to be the prediction on which cloning would be based.

[0119] The corresponding genes were subsequently cloned as described in Example 2.

[0120] The novel Drosophila GPCR sequences were named according to the most closely related GPCR as shown in Table 2.

TABLE 2
BLAST Analysis of New Drosophila G protein-Coupled Receptors

| SEQ | | | | | | |
|---|---|---|---|---|---|---|
| ID | | Best Blast Hit | Score | | | |
| NO. | Inventor's Reference | (Accession) | (bits) | E value | Identities | Positives |
| 1-2 | Adenosine_99E 1 | A2 adenosine | 207 | 2.00E−52 | 118/321 | 177/321 |
| | | receptor-guinea | | | (36%) | (54%) |
| | | pig(I48095) | | | | |
| 3-4 | Allatostatin_3E1 | Galanin receptor- | 656 | 0 | 327/394 | 327/394 |
| | | Drosophila | | | (82%) | (82%) |
| | | (AF220216) | | | | |
| 5-6 | Gastrin_2C3 | trehalose receptor 1- | 224 | 2.00E−57 | 128/358 | 193/358 |
| | | Drosophila | | | (35%) | (53%) |
| | | (AB034204) | | | | |
| 7-8 | wormlike_4F9 | 7 transmembrane | 171 | 2.00E−41 | 105/323 | 163/323 |
| | | receptor, rhodopsin- | | | 32% | 49% |
| | | type family member | | | | |
| | | family member- | | | | |
| | | C. elegans | | | | |
| | | (NP_510455.2) | | | | |
| 9-10 | Dopamine_6D7 | dopamine receptor | 132 | 1E−29 | 108/338 | 163/338 |
| | | D1D -chicken | | | 31% | 47% |
| | | (C55886) | | | | |
| 11-12 | Lymnokinin_11D9 | G protein-coupled | 349 | 9.00E−95 | 237/697 | 346/697 |
| | | receptor 106 Mus | | | (34%) | (49%) |
| | | musculus | | | | |
| | | (NP_536716.1) | | | | |
| 13-14 | mthlike1_15A | GPCR-Drosophila | 137 | 3.00E−31 | 102/383 | 175/383 |
| | | yakuba (AF300421) | | | (26%) | (45%) |
| 15-16 | gastrin_17E3 | cholecystokinin | 186 | 4.00E−46 | 125/390 | 175/390 |
| | | B/gastrin receptor- | | | (32%) | (44%) |
| | | mouse (P56481) | | | | |
| 17-18 | CCK-X_26A1 | probable allatostatin | 103 | 4.00E−21 | 54/189 | 95/189 |
| | | receptor-2- | | | (28%) | (49%) |
| | | Drosophila (JC7319) | | | | |
| 19-20 | neuroYY_26B1 | neuropeptide | 60.8 | 3.00E−08 | 39/114 | 65/114 |
| | | Y/peptide YY | | | (34%) | (56%) |
| | | receptor Yc-D. rerio | | | | |
| | | (AF037401) | | | | |
| 21-22 | GRHR_27A2 | GRHR-P1- | 802 | 0.00E+01 | 404/443 | 404/443 |
| | | Drosophila | | | (91%) | (91%) |
| | | (NM_058039) | | | | |
| 23-24 | Bombesin_42A10 | BRS4 Bombesin | 186 | 7.00E−46 | 119/327 | 172/327 |
| | | Receptor-Bombina | | | (36%) | (52%) |
| | | orientalis (P47751) | | | | |
| 25-26 | Latrophillin_44D4 | latrophilin-3-bovine | 246 | 1.00E−63 | 198/756 | 326/756 |
| | | (T18405) | | | (26%) | (42%) |
| 27-28 | wormlike_47E | hypothetical protein | 164 | 2.00E−39 | 111/358 | 182/358 |
| | | F57B7.1-C. elegans | | | (31%) | (50%) |
| | | (T22835) | | | | |
| 29-30 | Calcitonin_49F9 | Calcitonin receptor- | 272 | 8.00E−72 | 148/371 | 209/371 |
| | | like-human | | | (39%) | (55%) |
| | | (XM_002673) | | | | |
| 31-32 | DiureticHor2_51A1 | Diuretic Hormone | 352 | 1E−95 | 184/386 | 239/386 |
| | | Receptor-Acheta | | | (47%) | (61%) |
| | | (Q16983) | | | | |
| 33-34 | mthlike3_54B16 | methuselah- | 605 | 1.00E−172 | 294/512 | 377/512 |
| | | Drosophila yakuba | | | (57%) | (73%) |
| | | (AF280583) | | | | |
| 35-36 | bombesin_54D4 | bombesin/gastrin- | 207 | 2.00E−52 | 126/352 | 192/352 |
| | | releasing peptide | | | (35%) | (53%) |
| | | receptor-mouse | | | | |
| | | (A39003) | | | | |
| 37-38 | 5-HT1A_56A | 5-Hydroxytryptamine | 1254 | 0.00E+01 | 648/816 | 651/816 |
| | | receptor 2A- | | | (79%) | (79%) |
| | | Drosophila (S19155) | | | | |
| 39-40 | mAcR-60C | muscarinic | 1205 | 0.00E+01 | 607/788 | 607/788 |
| | | acetylcholine | | | (77%) | (77%) |
| | | receptor-Drosophila | | | | |
| | | (S05661) | | | | |
| 41-42 | Adrenergic_60D1 | trace amine receptor | 76.6 | 8.00E−13 | 46/174 | 84/174 |
| | | 1-rat (AF380186) | | | (26%) | (47%) |
| 43-44 | mthlike9_61C | GPCR-Drosophila | 159 | 5.00E−38 | 107/431 | 193/431 |
| | | melanogaster | | | (24%) | (43%) |
| | | (AF300364) | | | | |
| 45-46 | mthlike10_61C1 | GPCR-Drosophila | 1009 | 0 | 493/533 | 500/533 |
| | | melanogaster | | | (92%) | (93%) |
| | | (AF300364) | | | | |
| 47-48 | wormlike_62 | hypothetical protein | 173 | 5.00E−42 | 121/409 | 188/409 |
| | | F57B7.1-C. elegans | | | (29%) | (45%) |
| | | (T22835) | | | | |
| 49-50 | wormlike_63A3 | hypothetical protein | 138 | 2.00E−31 | 89/275 | 143/275 |
| | | T19F4.1b-C. elegans | | | (32%) | (51%) |
| | | (U55371) | | | | |
| 51-52 | adrenergic_64A | hypothetical protein | 189 | 4.00E−47 | 105/309 | 175/309 |
| | | F59D12.1-C. elegans | | | (33%) | (55%) |
| | | (T22996) | | | | |
| 53-54 | lymnokinin_64D3 | CG10626-PA | 1011 | 0 | 501/540 | 501/540 |
| | | [Drosophila | | | (92%) | (92%) |
| | | melanogaster] | | | | |
| | | (NP_647968.2) | | | | |
| 55-56 | mthlike2_64D4 | methuselah- | 630 | 1.00E−180 | 299/501 | 366/501 |
| | | Drosophila simulans | | | (59%) | (72%) |
| | | (AF280597) | | | | |
| 57-58 | GRHR_69B | putative corazonin | 1055 | 0 | 532/579 | 534/579 |
| | | receptor [Drosophila | | | (91%) | (91%) |
| | | melanogaster] | | | | |
| | | (AAN10045.1) | | | | |
| 59-60 | somatostatin_75C1 | allatostatin | 785 | 0 | 394/467 | 394/467 |
| | | C/drostatin C | | | (84%) | (84%) |
| | | receptor 1 | | | | |
| | | [Drosophila | | | | |
| | | melanogaster] | | | | |
| | | (AAG54080.1) | | | | |
| 61-62 | NeuroYlike_77A1 | putative | 210 | 3.00E−53 | 126/356 | 174/356 |
| | | neuropeptide | | | (35%) | (48%), |
| | | receptor NPR1- | | | | |
| | | Girardia (AF329279) | | | | |
| 63-64 | Secretagogue_79A | neuromedin U | 200 | 3.00E−50 | 116/328 | 188/328 |
| | | receptor type 2- | | | (35%), | (56%), |
| | | mouse (AY057384) | | | | |
| 65-66 | 5-HT2_82C4 | serotonin receptor 5- | 1338 | 0.00E+01 | 682/868 | 683/868 |
| | | HT2-Drosophila | | | (78%), | (78%), |
| | | (X81835) | | | | |
| 67-68 | NeuroYYlike_83 | neuropeptide F | 874 | 0.00E+01 | 442/481 | 443/481 |
| | | receptor-Drosophila | | | (91%), | (91%) |
| | | (AF364400) | | | | |
| 69-70 | mAcChR_84E8 | G protein-linked | 200 | 7.00E−50 | 98/193 | 133/193 |
| | | cetylcholine receptor | | | (50%), | (68%), |
| | | GAR-2c-C. elegans | | | | |
| | | (AF272738) | | | | |
| 71-72 | Takr-86C_86C3 | tachykinin receptor | 987 | 0.00E+01 | 492/504 | 493/504 |
| | | NKD-Drosophila | | | (97%) | (97%) |
| | | (A41783) | | | | |
| 73-74 | mthlike5_87A | methuselah- | 72 | 1.00E−11 | 57/251 | 111/251 |
| | | Drosophila simulans | | | (22%) | (43%) |
| | | (AF280601) | | | | |
| 75-76 | GrowthHormone_87F1 | putative PRXamide | 986 | 0 | 508/595 | 508/595 |
| | | receptor [Drosophila | | | (85%) | (85%) |
| | | melanogaster] | | | | |
| | | (AAN10043.1) | | | | |
| 77-78 | neurotensin_88B1 | putative PRXamide | 783 | 0 | 400/430 | 400/430 |
| | | receptor [Drosophila | | | (93%) | (93%) |
| | | melanogaster] | | | | |
| | | (AAN10044.1) | | | | |
| 79-80 | DopR_88B1 | dopamine receptor | 912 | 0.00E+01 | 453/511 | 454/511 |
| | | protein 1-Drosophila | | | (88%) | (88%) |
| | | (P41596) | | | | |
| 81-82 | Octopamine_90C2 | putative octopamine | 114 | 3.00E−24 | 66/187 | 94/187 |
| | | receptor-Mamestra | | | (35%) | (49%) |
| | | (AF343878) | | | | |
| 83-84 | FSHlike_96E5 | G protein coupled | 365 | 2E−99 | 240/720 | 366/720 |
| | | receptor affecting | | | (33%) | (50%) |
| | | testicular descent - | | | | |
| | | Homo | | | | |
| | | (NP_570718.1) | | | | |
| 85-86 | Histamine_97B | histamine H2 | 52 | 2.00E−05 | 38/117 | 50/117 |
| | | receptor-dog | | | (32%) | (42%) |
| | | (A39008) | | | | |
| 87-88 | NeuropepYR_97E1 | neuropeptide Y | 931 | 0.00E+01 | 445/449 | 447/449 |
| | | receptor-Drosophila | | | (99%) | (99%) |
| | | (A41738) | | | | |
| 89-90 | Galanin_98E2 | allatostatin GPCR- | 600 | 1.00E−171 | 308/357 | 308/357 |
| | | Drosophila | | | (86%) | (86%) |
| | | (AF253526) | | | | |
| 91-92 | Takr-99D_99D1 | tachykinin receptor | 919 | 0.00E+01 | 452/519 | 453/519 |
| | | homolog DTKR- | | | (87%) | (87%) |
| | | Drosophila (S17783) | | | | |
| 93-94 | 5-HT7_100A2 | 5HT-dro serotonin | 885 | 0.00E+01 | 454/564 | 454/564 |
| | | receptor-Drosophila | | | (80%) | (80%) |
| | | (M55533) | | | | |
| 95-96 | He6Receptor_100B1 | Me6 receptor splice | 104 | 7E−21 | 107/439 | 179/439 |
| | | variant d3 Mus | | | (24%) | (40%) |
| | | musculus | | | | |
| | | (AAN33059.1) | | | | |
| 97-98 | Fsh_90c2 | FSH-TSH | 1590 | 0 | 787/831 | 787/831 |
| | | [Drosophila | | | 94% | 94% |
| | | melanogaster] | | | | |
| | | (AAB07030.1) | | | | |
| 99-100 | He6rec2_100b2 | HE6 heptahelical | 80.5 | 1.00E−13 | 104/482 | 178/482 |
| | | receptor splice | | | 21% | 36% |
| | | variant 23-Homo | | | | |
| | | sapiens | | | | |
| | | (AAN38974.1) | | | | |
| 101-102 | Prostaglandin_74f1 | prostaglandin E | 62.4 | 1.00E−08 | 61/255 | 102/255 |
| | | receptor 1 (subtype | | | 23% | 39% |
| | | EP1), 42 kDa; | | | | |
| | | Prostaglandin | | | | |
| | | E(NP_000946.1) | | | | |
| 103-104 | Oct-TyrR_79D1 | tyramine receptor - | 977 | 0 | 498/601 | 499/601 |
| | | fruit fly (Drosophila | | | 82% | 82% |
| | | sp.) (S12004) | | | | |

[0121] I. C. Identification of Heliothis G protein-coupled Receptors Heliothis virescens (hereinafter “Heliothis”) GPCR sequences were obtained by PCR using degenerate primers designed according to 5 Drosophila GPCR sequences, as described in Example 3. Heliothis GPCR fragments derived from this method were assembled by recognition of overlapping sequence. The Heliothis GPCR was named based on the most closely related insect GPCR (Table 3).

TABLE 3
BLAST Results of Heliothis GPCR

| SEQ ID | Inventor's | Best Blast Hit | Score | | | |
|---|---|---|---|---|---|---|
| NO. | Reference | (Accession) | (bits) | E value | Identities | Positives |
| 105-106 | Heliothis | GPCR-Balanus ampitrite | 407 | 1.00E−112 | 217/446 | 272/446 |
| | Oct2B | (Q93126) | | | (48%) | (60%) |

[0122] II. D. Identification of Manduca Sexta GPCR

[0123] The Diuretic Hormone GPCR nucleic acid and protein described in the application was identified and cloned by J. D. Reagan as described in J. Biol. Chem. 269 (1):9-12 (1994) (GenBank Accession No. U03489, hereby both incorporated by reference). The BLAST results are set forth below in Table 4.

TABLE 4
BLAST Analysis of Manduca GPCR

| SEQ ID | Inventor's | Best Blast Hit | Score | E | | |
|---|---|---|---|---|---|---|
| NO. | Reference | (Accession) | (bits) | value | Identities | Positives |
| 107-108 | Manduca | Diuretic Hormone | 364 | 1.00E−100 | 187/379 | 237/379 |
| | DHR | Receptor-Acheta | | | (49%) | (62%) |
| | | (Q16983) | | | | |

[0124] III. Functional Analysis of G Protein-Coupled Receptors

[0125] Many insect pests inflict plant damage by the feeding activity during larval stages. Therefore, functional analyses to assess phenotypes associated with modulation of a GPCRs during larval development can be used to identify candidate insecticide targets. The present invention discloses GPCRs whose regulation is relevant to larval viability. Thus, modulators that alter GPCR activity in a manner analogous to the changes resulting from genetic manipulations described herein below, can be useful as insecticide compositions.

[0126] III.A. Loss-of-Function Analyses

[0127] RNA-mediated interference (RNAi) is a recently discovered method to determine gene function in a number of organisms, wherein double-stranded RNA (dsRNA) directs gene-specific, post-transcriptional silencing. See, e.g., Kuwabara & Olson (2000) Parasitol Today 16(8):347-349; Bass (2000) Cell 101(3):235-238; Hunter (2000) Curr Biol 10(4):R137-140; Bosher & Labouesse (2000) Nat Cell Biol 2(2):E31-36; Sharp (1999) Genes Dev 13(2):139-141. The double-stranded RNA molecule can be synthesized in vitro and then introduced into the organism by injection or other methods. Alternatively, a heritable transgene exhibiting dyad symmetry can provide a transcript that folds as a hairpin structure. Methods for examining gene functions using dsRNAi in Drosophila are disclosed in Example 4 and further in Kennerdell & Carthew (2000) Nat Biotech 18(8):896-898; Lam & Thummel (2000) Curr Biol 10(16):957-963; Misquitta & Paterson (1999) Proc Natl Acad Sci USA 96 (4):1451-1456.

[0128] The present invention discloses RNA-mediated interference of Drosophila GPCRs Double-stranded RNA complementary to each GPCR sequence was synthesized in vitro and injected into early Drosophila embryos, as described in Example 4. Development of injected embryos was assessed by scoring: (a) morphological criteria using a light microscope (Campos-Ortega & Hartenstein (1985) The Embryonic Development of Drosophila melanogaster, Springer-Verlag, Berlin), (b) embryo hatching to become a larvae, (c) puparium formation, and (d) eclosion of the pupae as an adult fly, as indicated in Table 5 herein below. Buffer-injected embryos were injected and monitored in parallel as a control. The percentage of embryos injected with dsRNA that survive to the adult stage is set forth in

TABLE 5
Results of dsRNAi Analysis

| | | | | | | % viable |
|---|---|---|---|---|---|---|
| | | # eggs | | | | adults |
| | | showing | # | | | from |
| | # eggs | morphological | hatched | # | # | developed |
| dsRNA injected | injected | development | larvae | pupae | adults | eggs |
| none, buffer only | 941 | 806 | 580 | 500 | 433 | 0.53722 |
| ds-latrophillin 44d4 | 178 | 142 | 106 | 45 | 35 | 0.2464788 |
| Ds-5-HT2_82C4 | 186 | 153 | 56 | 46 | 39 | 0.2549019 |
| Ds-adenosine_99E1 | 169 | 136 | 70 | 49 | 37 | 0.2720588 |
| ds-mth-like 10_61C1 | 208 | 175 | 92 | 68 | 58 | 0.3314285 |
| ds-takr 99D_99D1 | 697 | 599 | 332 | 234 | 218 | 0.363939 |
| mAcR_60C | 104 | 92 | 48 | 37 | 34 | 0.3695652 |
| ds-dopr_88B1 | 108 | 80 | 44 | 37 | 30 | 0.375 |
| ds-npep YY-like 83 | 112 | 96 | 66 | 44 | 40 | 0.4166666 |
| ds-takr86c_86C3 | 107 | 91 | 61 | 44 | 38 | 0.4175824 |
| ds-gastrin 17e3 | 107 | 93 | 61 | 43 | 39 | 0.4193548 |
| ds-mthlike1 15a | 107 | 96 | 62 | 48 | 41 | 0.4270833 |
| ds-gastrin 2c3 | 219 | 185 | 104 | 95 | 81 | 0.4378378 |
| ds-wormlike(47E) | 125 | 111 | 84 | 63 | 49 | 0.4414414 |
| 5-HT7_100A2 | 95 | 79 | 48 | 36 | 35 | 0.4430379 |
| ds-mAcChR 84e | 109 | 94 | 69 | 49 | 42 | 0.4468085 |
| ds-histamine_97B | 100 | 84 | 58 | 47 | 38 | 0.4523809 |
| ds-mth-like 9_61C | 107 | 91 | 56 | 44 | 43 | 0.4725274 |
| ds-adren 64a | 172 | 154 | 115 | 87 | 74 | 0.4805194 |
| ds-fshlike 96e5 | 100 | 91 | 63 | 48 | 44 | 0.4835164 |
| ds-allatostatin_3E1 | 195 | 156 | 104 | 81 | 78 | 0.5 |
| ds-lymnokinin 64D | 191 | 155 | 116 | 92 | 78 | 0.5032258 |
| ds-cck-x 26a1 | 298 | 249 | 158 | 133 | 126 | 0.506024 |
| ds-bombesin 42a10 | 78 | 67 | 48 | 37 | 34 | 0.5074626 |
| ds-lymnokinin 11d9 | 106 | 92 | 66 | 53 | 49 | 0.5326086 |
| ds-5-ht1a 56a | 104 | 95 | 73 | 56 | 51 | 0.5368421 |
| ds-galanin 98e2 | 93 | 86 | 59 | 55 | 47 | 0.5465116 |
| ds-he6 | 94 | 84 | 64 | 52 | 46 | 0.5476190 |
| receptor_100B1 | | | | | | |
| ds-mthlike3 54b16 | 109 | 103 | 75 | 63 | 58 | 0.5631067 |
| ds-npep Y-like 77a | 191 | 164 | 109 | 103 | 93 | 0.5670731 |
| ds-grhr 27a2 | 114 | 105 | 79 | 63 | 60 | 0.5714285 |
| ds-mthlike5 87a | 102 | 94 | 68 | 60 | 56 | 0.5957446 |
| Ds- | 113 | 85 | 58 | 58 | 51 | 0.6 |
| neurotensin_88B1 | | | | | | |
| ds-octopamine 90C2 | 100 | 85 | 67 | 60 | 51 | 0.6 |
| ds-wormlike 62 | 99 | 91 | 66 | 57 | 55 | 0.6043956 |
| ds-bombesin 54d4 | 95 | 81 | 60 | 51 | 49 | 0.6049382 |
| ds-adrenergic 60d1 | 105 | 97 | 77 | 64 | 59 | 0.6082474 |
| ds-wormlike 63a3 | 103 | 94 | 82 | 62 | 60 | 0.6382978 |
| ds-npep YY26b1 | 124 | 108 | 77 | 74 | 69 | 0.6388888 |
| ds-octopamine 90c2 | 101 | 81 | 68 | 54 | 54 | 0.6666666 |
| ds-calcitonin 49f9 | 106 | 93 | 79 | 64 | 63 | 0.6774193 |
| ds-neuropep yr 97e1 | 104 | 97 | 84 | 74 | 66 | 0.6804123 |
| ds-secretagogue 79a | 103 | 96 | 76 | 71 | 67 | 0.6979166 |
| ds-wormlike 4f9 | 110 | 100 | 83 | 72 | 70 | 0.7 |
| ds-diuretichor2 51a1 | 113 | 105 | 83 | 76 | 74 | 0.7047619 |
| ds-somatostatin 75c1 | 95 | 82 | 70 | 66 | 59 | 0.7195121 |
| ds-grhr 69b | 92 | 80 | 69 | 62 | 59 | 0.7375 |
| ds-mthlike2 64d4 | 99 | 86 | 77 | 67 | 65 | 0.7558139 |
| ds-dopamine 6d7 | 109 | 103 | 86 | 84 | 79 | 0.7669902 |

[0129] Lethality resulting from loss of GPCR function is predicted to be mimicked by provision of an antagonist substance that specifically binds a given receptor. GPCR antagonists can be identified by methods known in the art and as further disclosed in the section entitled Identification of Insect GPCR Modulators, herein below. The essentiality of GPCRs, in particular, latrophillin, disclosed herein for the first time, identifies the utility of antagonists that block or mitigate the activity of GPCRs and latrophillin as insecticides.

[0130] III.B. Gain-of-Function Analyses

[0131] Ectopic expression systems have been used to elucidate gene function when classical loss-of-function genetics is not straightforward. For example, heat-induced expression of spaghetti squash, which encodes the nonmuscle myosin II regulatory light chain, can effectively rescue the early lethality of spaghetti squash mutants, facilitating the analysis of phenotypes later in development (Edwards & Kiehart (1996) Development 122:1499). Similarly, dominant phenotypes generated by over-expressing a gene of interest have been used to address post-embryonic gene functions, particularly in cases where gene mutation results in embryonic lethality. See, e.g., Lam et al. (1999) Dev Biol 212(1):204-216; Woodard et al. (1994) Cell 79(4):607-615).

[0132] Transgenic methods for ectopic expression in Drosophila utilize promoters that drive either constitutive or regulated expression of the gene of interest. Constructs designed for ectopic expression can be prepared in a transformation vector, and are introduced into the fly genome by germ line transformation. A transgenic line is established, and ectopic expression of the gene of interest can be analyzed in a wild type or mutant genetic background.

[0133] In one embodiment, a heat shock promoter is used to temporally regulate gene expression (Lis et al. (1983) Cell 35:403; Struhl (1985) Nature 318:677; Schneuwly et al. (1987) Nature 325:816). Using this approach, the level of ectopic gene expression can be easily modulated by altering the temperature and/or duration of the heat treatment. In another embodiment, gene expression may be regulated temporally or spatially by GAL4-UAS system, essentially as described by Brand and Perrimon (1993) Development 118: 401.

[0134] Over-expression of GPCRs can reveal the role of an activated GPCR. Provision of ligand and/or apo-receptor (a receptor not bound by ligand) favors formation of the liganded receptor. Similarly, provision of excess GPCR over-expression also leads to an excess of active receptor. See, e.g., Tsai et al. (1998) in Wilson et al., eds, Williams Textbook of Endocrinology, pp. 55-94, W. B. Saunders Company, Philadelphia, Pa., and references cited therein. To create this situation in vivo, a GPCR is over-expressed using a heterologous transgene. This strategy enables a functional assessment of orphan GPCRs, wherein a ligand has not yet been identified. A phenotype observed following GPCR over-expression is predicted to also be generated by abnormally elevated levels of endogenous ligand or by administration of a GPCR agonist.

[0135] III.C. Expression Pattern Analysis of GPCRs

[0136] Identification of the particular cells in which a gene is expressed aids in the determination of function and in the realization of that gene as an insecticide target. Tissues required for larval growth or viability represent better sites of insecticide action than non-essential tissues, such as the larval imaginal discs or the optic lobes of the brain which will only have a function in the adult animal.

[0137] The tissue specific expression of GPCRs is determined by examining either the localization of the mRNA transcript or by following the expression of the protein itself. Numerous methods are available to those in the art to determine in which tissues a gene transcript is expressed including, but not limited to: reverse transcriptase polymerase chain reaction (rtPCR), Northern blots and in situ hybridization. Similarly the protein localization methods are known in the art and include, but are not limited to detection by Western blot or immunocytology.

[0138] The present invention discloses the expression pattern of insect GPCRs by in situ hybridization. Embryos and wandering third instar larvae of wild-type Drosophila melanogaster (OreR strain) are processed for in situ hybridization. Embryos are processed according to the procedure found at the Berleley Drosophila Genome Project website (http://www.fruitfly.org/about/methods/RNAinsitu.html). Larvae are dissected and processed in the same manner as embryos. Hybridization probes representing a labeled antisense strand of each gene are generated and used. After hybridization, bound probe is identified with a calorimetric substrate. The location of the signal was further characterized by further dissection and mounting the tissue for compound microscope examination. Results of expression pattern analysis are described in Example 5 and Table 6.

[0139] IV. Recombinant Expression of Insect G Protein-Coupled Receptors

[0140] For recombinant production of a protein of the invention in a host organism, a nucleotide sequence encoding the protein is inserted into an expression cassette designed for the chosen host and introduced into the host where it is recombinantly produced. The choice of the specific regulatory sequences such as promoter, signal sequence, 5′ and 3′ untranslated sequence, and enhancer appropriate for the chosen host is within the level of ordinary skill in the art. The resultant molecule, containing the individual elements linking in the proper reading frame, is inserted into a vector capable of being transformed into the host cell.

[0141] Expression constructs can be transfected into a host cell by a standard method suitable for the selected host, including electroporation, calcium phosphate precipitation, DEAE-Dextran transfection, liposome-mediated transfection, infection using a retrovirus, transposon-mediated transfer, and particle bombardment techniques. The expression cassette sequence carried in the expression construct can be stably integrated into the genome of the host or it can be present as an extrachromosomal molecule.

[0142] Suitable expression vectors and methods for recombinant production of proteins are known for host organisms such as E. Coli, yeast, and insect cells. See, e.g., Lucknow & Summers (1988) Bio/Technol 6:47. Representative methods for recombinant production of an insect GPCR in E. coli are disclosed in Example 6.

[0143] Additional suitable expression vectors are baculovirus expression vectors, e.g., those derived from the genome of Autographica californica nuclear polyhedrosis virus (AcMNPV). A preferred baculovirus/insect system is PVL1392/PVL1393 used to transfect Spodoptera frugiperda (SF9) cells in the presence of linear Autographica californica baculovirus DNA (Pharmingen of San Diego, Calif.). The resulting virus is used to infect HighFive Tricoplusia ni cells (Invitrogen, Corp. of Carlsbad, Calif.). Representative methods for recombinant production of an insect GPCR in insect cells are disclosed in Example 7.

[0144] Recombinantly produced proteins can be isolated and purified using a variety of standard techniques. The actual techniques used varies depending upon the host organism used, whether the protein is designed for secretion, and other such factors. Such techniques are known to the skilled artisan. See Ausubel et al. (1992) Current Protocols in Molecular Biology, John Wylie and Sons, Inc., New York, N.Y.

[0145] The present invention further encompasses recombinant expression of the disclosed insect GPCRs, or portion thereof, in plants, as described further herein below under the section entitled Transgenic Plants.

[0146] V. Production of Antibodies Against Insect G protein-Coupled Receptors

[0147] In another aspect, the present invention provides a method of producing an antibody immunoreactive with an insect GPCR polypeptide, the method comprising recombinantly or synthetically producing an insect GPCR polypeptide, or portion thereof, to be used as an antigen. The insect GPCR polypeptide is formulated so that it is can be used as an effective immunogen. An animal is immunized with the formulated insect GPCR polypeptide to generate an immune response in the animal. The immune response is characterized by the production of antibodies that can be collected from the blood serum of the animal. Optionally, cells producing an insect GPCR antibody can be fused with myeloma cells, whereby a monoclonal antibody can be selected. Exemplary methods for producing a monoclonal antibody that recognizes an insect GPCR protein are described in standard laboratory protocol manuals available to those of ordinary skill in the art. Preferred embodiments of the method use a polypeptide set forth as any one of even numbered sequences of SEQ ID NOs:2-120.

[0148] The present invention also encompasses antibodies and cell lines that produce monoclonal antibodies as described herein.

[0149] The foregoing antibodies can be used in methods known in the art relating to the localization and activity of the insect GPCR polypeptide sequences of the invention, e.g., for cloning of insect GPCR nucleic acids, immunopurification of insect GPCR polypeptides, imaging insect GPCR polypeptides in a biological sample, and measuring levels thereof in appropriate biological samples.

[0150] VI. Methods for Detecting an Insect Receptor Nucleic Acid

[0151] In another aspect of the invention, a method is provided for detecting a nucleic acid molecule that encodes an insect GPCR polypeptide. Such methods can be used to detect insect GPCR gene variants and related resistance gene sequences. The disclosed methods facilitate genotyping, cloning, gene mapping, and gene expression studies.

[0152] The nucleic acids of the present invention can be used to clone genes and genomic DNA comprising the disclosed sequences. Alternatively, the nucleic acids of the present invention can be used to clone genes and genomic DNA of related sequences, preferably GPCR genes in pest insects and nematodes. Using the nucleic acid sequences disclosed herein, such methods are known to one skilled in the art. See, for example, Sambrook et al., eds (1989) Molecular Cloning, Cold Spring Harbor Laboratory Press, Cold Spring Harbor, N.Y. Representative methods are also disclosed in Examples 2 and 3. Preferably, the nucleic acids used for this method comprise sequences set forth as any one of odd numbered sequences of SEQ ID NOs:1-107.

[0153] In one embodiment, genetic assays based on nucleic acid molecules of the present invention can be used to screen for genetic variants by a number of PCR-based techniques, including single-strand conformation polymorphism (SSCP) analysis (Orita et al. (1989) Proc Natl Acad Sci USA 86(8):2766-2770), SSCP/heteroduplex analysis, enzyme mismatch cleavage, direct sequence analysis of amplified exons (Kestila et al. (1998) Mol Cell 1(4):575-582; Yuan et al. (1999) Hum Mutat 14(5):440-446), allele-specific hybridization (Stoneking et al. (1991) Am J Hum Genet 48(2):370-82), and restriction analysis of amplified genomic DNA containing the specific mutation. Automated methods can also be applied to large-scale characterization of single nucleotide polymorphisms (Brookes (1999) Gene 234(2):177-186; Wang et al. (1998) Science 280(5366):1077-1082). Preferred detection methods are non-electrophoretic, including, for example, the TaqMan™ allelic discrimination assay, PCR-OLA, molecular beacons, padlock probes, and well fluorescence. See Landegren et al. (1998) Genome Res 8:769-776.

[0154] VII. Methods for Detecting an Insect G Protein-Coupled Receptor Polypeptide

[0155] In another aspect of the invention, a method is provided for detecting a level of insect GPCR polypeptide using an antibody that specifically recognizes an insect GPCR polypeptide, or portion thereof. In a preferred embodiment, biological samples from an experimental subject and a control subject are obtained, and insect GPCR polypeptide is detected in each sample by immunochemical reaction with the insect GPCR antibody. More preferably, the antibody recognizes amino acids of any one of even numbered sequences of SEQ ID NOs:2-120; and is prepared according to a method of the present invention for producing such an antibody.

[0156] In one embodiment, an insect GPCR antibody is used to screen a biological sample for the presence of an insect GPCR polypeptide. A biological sample to be screened can be a biological fluid such as extracellular or intracellular fluid, or a cell or tissue extract or homogenate. A biological sample can also be an isolated cell (e.g., in culture) or a collection of cells such as in a tissue sample or histology sample. A tissue sample can be suspended in a liquid medium or fixed onto a solid support such as a microscope slide. In accordance with a screening assay method, a biological sample is exposed to an antibody immunoreactive with an insect GPCR polypeptide whose presence is being assayed, and the formation of antibody-polypeptide complexes is detected. Techniques for detecting such antibody-antigen conjugates or complexes are known in the art and include but are not limited to centrifugation, affinity chromatography and the like, and binding of a labeled secondary antibody to the antibody-candidate receptor complex.

[0157] A modulator that shows specific binding to an insect modulator can also be used to detect an insect GPCR. Representative techniques for assaying specific binding include are described herein above under the heading “Identification of Insect GPCR Modulators”.

[0158] The disclosed methods for detecting an insect GPCR polypeptide can be useful to determine altered levels of gene expression that are associated with particular conditions such as enhanced tolerance to insecticides that target a particular insect GPCR polypeptide.

[0159] VIII. Identification of GPCR Modulators

[0160] The present invention further discloses a method for identifying a compound that modulates an insect GPCR. As used herein, the terms “candidate substance” and “candidate compound” are used interchangeably and refer to a substance that is believed to interact with another moiety, wherein a biological activity is modulated. For example, a representative candidate compound is believed to interact with an insect GPCR polypeptide, or fragment thereof, and can be subsequently evaluated for such an interaction. Exemplary candidate compounds that can be investigated using the methods of the present invention include, but are not restricted to, viral epitopes, peptides, enzymes, enzyme substrates, co-factors, lectins, sugars, oligonucleotides or nucleic acids, oligosaccharides, proteins, chemical compounds, small molecules, and antibodies. A candidate compound to be tested can be a purified molecule, a homogenous sample, or a mixture of molecules or compounds.

[0161] As used herein, the term “modulate” means an increase, decrease, or other alteration of any or all chemical and biological activities or properties of a wild-type insect GPCR polypeptide, preferably an insect GPCR polypeptide of any one of the even-numbered SEQ ID NOs:2-108. Preferably, an insect GPCR modulator is an agonist of an insect GPCR protein activity.

[0162] In accordance with the present invention there is also provided a rapid and high throughput screening method that relies on the methods described above. This screening method comprises separately contacting each compound with a plurality of substantially identical target molecules. In such a screening method the plurality of target molecules preferably comprises more than about 10⁴ samples, or more preferably comprises more than about 5×10⁴ samples. In an alternative high-throughput strategy, each target molecule can be contacted with a plurality of candidate compounds.

[0163] In one embodiment, the disclosed methods for identifying modulators of insect GPCRs are performed using GPCR sequences set forth as any one of even-numbered SEQ ID NOS:2-108. In particular, the loss-of-function lethality that is observed when latrophilin function is disrupted which suggests that antagonists of latrophilin can be useful as insecticides.

[0164] The disclosed methods for identifying modulators of insect GPCRs can be performed using nucleic acid sequences derived from a pest organism. The GPCR sequences disclosed herein provide methods for identifying homologous sequences in pest species. Such techniques are well know to those in the art. See, for example, Sambrook et al., eds (1989) Molecular Cloning, Cold Spring Harbor Laboratory Press, Cold Spring Harbor, N.Y., and Examples 2 and 3 herein below.

[0165] In a preferred embodiment, the disclosed methods for identifying modulators employ a Heliothis octopamine GPCR polypeptide.

[0166] Representative methods for identification of a substance that binds and thereby modulates an insect GPCR are disclosed herein below. The term “binding” refers to an affinity between two molecules, for example, a ligand and a receptor. As used herein, “binding” means a preferential binding of one molecule for another in a mixture of molecules. The binding of the molecules can be considered specific if the binding affinity is about 1×10⁴ M⁻¹ to about 1×10⁶ M⁻¹ or greater. Binding of two molecules also encompasses a quality or state of mutual action such that an activity of one protein or compound on another protein is inhibitory (in the case of an antagonist) or enhancing (in the case of an agonist). To demonstrate saturable binding of a candidate compound, identified by any such method, to a GPCR ligand binding domain, Scatchard analysis can be carried out as described, for example, by Mak et al. (1989) J Biol Chem 264:21613:21618.

[0167] VIII.A. Protein Binding Assays

[0168] Several techniques can be used to detect interactions between a protein and a chemical ligand without employing an in vivo ligand. Representative methods include, but are not limited to, Fluorescence Correlation Spectroscopy, Surface-Enhanced Laser Desorption/Ionization Time-Of-flight Spectroscopy, and Biacore technology, as described herein below. These methods are amenable to automated, high-throughput screening.

[0169] Fluorescence Correlation Spectroscopy (FCS) measures the average diffusion rate of a fluorescent molecule within a small sample volume (Madge et al. (1972) Phys Rev Lett 29:705-708; Maiti et al. (1997) Proc Natl Acad Sci USA 94:11753-11757). The sample size can be as low as 10³ fluorescent molecules and the sample volume as low as the cytoplasm of a single bacterium. The diffusion rate is a function of the mass of the molecule and decreases as the mass increases. FCS can therefore be applied to polypeptide-ligand interaction analysis by measuring the change in mass and therefore in diffusion rate of a molecule upon binding. In a typical experiment, the target to be analyzed is expressed as a recombinant polypeptide with a sequence tag, such as a poly-histidine sequence, inserted at the N-terminus or C-terminus. The expression takes place in E. coli, yeast or mammalian cells. The polypeptide is purified using chromatographic methods. For example, the poly-histidine tag can be used to bind the expressed polypeptide to a metal chelate column such as Ni²⁺ chelated on iminodiacetic acid agarose. The polypeptide is then labeled with a fluorescent tag such as carboxytetramethylrhodamine or BODIPY™ (Molecular Probes of Eugene, Oreg.). The polypeptide is then exposed in solution to the potential ligand, and its diffusion rate is determined by FCS using instrumentation available from Carl Zeiss, Inc. (Thornwood, New York). Ligand binding is determined by changes in the diffusion rate of the polypeptide.

[0170] Surface-Enhanced Laser Desorption/lonization (SELDI) was developed by Hutchens & Yip (1993) Rapid Commun Mass Spectrom 7:576-580. When coupled to a time-of-flight mass spectrometer (TOF), SELDI provides a technique to rapidly analyze molecules retained on a chip. It can be applied to ligand-protein interaction analysis by covalently binding the target protein, or portion thereof, on the chip and analyzing by MS the small molecules that bind to this protein (Worrall et al. (1998) Anal Biochem 70:750-756). In a typical experiment, the target to be analyzed is expressed as described for FCS. The purified protein is then used in the assay without further preparation. It is bound to the SELDI chip either by utilizing the poly-histidine tag or by other interaction such as ion exchange or hydrophobic interaction. The chip thus prepared is then exposed to the potential ligand via, for example, a delivery system able to pipet the ligands in a sequential manner (autosampler). The chip is then washed in solutions of increasing stringency, for example a series of washes with buffer solutions containing an increasing ionic strength. After each wash, the bound material is analyzed by submitting the chip to SELDI-TOF. Ligands that specifically bind the target are identified by the stringency of the wash needed to elute them.

[0171] Biacore relies on changes in the refractive index at the surface layer upon binding of a ligand to a target polypeptide immobilized on the layer. In this system, a collection of small ligands is injected sequentially in a 2-5 microliter cell, wherein the target polypeptide is immobilized within the cell. Binding is detected by surface plasmon resonance (SPR) by recording laser light refracting from the surface. In general, the refractive index change for a given change of mass concentration at the surface layer is practically the same for all proteins and peptides, allowing a single method to be applicable for any protein (Liedberg et al. (1983) Sensors Actuators 4:299-304; Malmquist (1993) Nature 361:186-187). In a typical experiment, the target to be analyzed is expressed as described for FCS. The purified protein is then used in the assay without further preparation. It is bound to the Biacore chip either by utilizing the poly-histidine tag or by other interaction such as ion exchange or hydrophobic interaction. The chip thus prepared is then exposed to the potential ligand via the delivery system incorporated in the instruments sold by Biacore (Uppsala, Sweden) to pipet the ligands in a sequential manner (autosampler). The SPR signal on the chip is recorded and changes in the refractive index indicate an interaction between the immobilized target and the ligand. Analysis of the signal kinetics of on rate and off rate allows the discrimination between non-specific and specific interaction.

[0172] VIII.B. Peptide Interaction Assays

[0173] Methods for displaying diverse peptide libraries enable rapid library construction, amplification, and selection of ligands directed against a target molecule. See Lowman (1997) Annu Rev Biophys Biomol Struct 26:401-424; Sidhu (2000) Curr Opin Biotech 11(6):610-616; and U.S. Pat. No. 5,510,240. Assays can also be employed that select peptides capable of disrupting the interaction between a GPCR and a requisite co-factor, as described by Hall et al. (2000) Mol Enodcrinol 14(12):2010-2023; Northrop et al. (2000) Mol Endocrinol 14(5)605-622; International Publication No. WO 00/37077, herein incorporated by reference.

[0174] VIII.C. Transcriptional Assays

[0175] The present invention also provides methods for identifying modulators of insect GPCR transcriptional activation. One strategy employs an expression system comprising: (1) an insect GPCR comprising a functional ligand binding domain of an insect GPCR, (2) a target gene expression cassette comprising a response element regulated by the GPCR operatively linked to a reporter gene, and (3) a test compound. Methods for constructing a GPCR gene and a target gene expression cassette are described herein below under the heading “Chimeric Receptors for Inducible Gene Expression”. See also, Wentworth et al. (2000) J Endocrinol 166(3):R11-16; Yang & Chen (1999) Cancer Res 59(18):4519-4524, and U.S. Pat. No. 4,981,784, herein incorporated by reference.

[0176] The term “reporter gene” refers to a heterologous gene encoding a product that is readily observed and/or quantitated. A reporter gene is heterologous in that it originates from a source foreign to an intended host cell or, if from the same source, is modified from its original form. Any suitable reporter and detection method can be used in accordance with the disclosed methods. Non-limiting examples of detectable reporter genes that can be operatively linked to a transcriptional regulatory region can be found in Alam and Cook (1990) Anal Biochem 188:245-254 and International Publication No. WO 97/47763. Preferred reporter genes for transcriptional analyses include the lacZ gene (See, e.g., Rose and Botstein (1983) Meth Enzymol 101:167-180), Green Fluorescent Protein (GFP) (Cubitt et al. (1995) Trends Biochem Sci 20:448455), luciferase, or chloramphenicol acetyl transferase (CAT).

[0177] An amount of reporter gene can be assayed by any method for qualitatively, or preferably quantitatively, determining presence or activity of the reporter gene product. The amount of reporter gene expression directed by each test substance is compared to an amount of reporter gene expression in the absence of a test substance. A test substance is identified as having agonist activity when there is significant increase in a level of reporter gene expression in the presence of the substance when compared to a level of reporter gene expression in the absence of the test substance. The term “significant increase”, as used herein, refers to an quantified change in a measurable quality that is larger than the margin of error inherent in the measurement technique, preferably an increase by about 2-fold or greater relative to a control measurement, more preferably an increase by about 5-fold or greater, and most preferably an increase by about 10-fold or greater.

[0178] VIII.D. Rational Design

[0179] The knowledge of the structure a native GPCR polypeptide provides an approach for rational pesticide design. See, e.g. Schapira et al. (2000) Proc Natl Acad Sci USA 97(3):1008-1013. The structure of a GPCR polypeptide can be determined by X-ray crystallography or by computational algorithms that generate three-dimensional representations. See Huang et al. (2000) Pac Symp Biocomput 230-41; Saqi et al. (1999) Bioinformatics 15:521-522; International Publication No. WO 99/26966, herein incorporated by reference. Alternatively, a working model of a GPCR structure can be derived by homology modeling (Huang et al. (2000) Acta Pharmacol Sin. Jun;21(6):529-35. Computer models can further predict binding of a protein structure to various substrate molecules that can be synthesized and tested. Additional compound design techniques are described in U.S. Pat. Nos. 5,834,228 and 5,872,011.

[0180] IX. Methods for Pest Control

[0181] Another aspect of the present invention is a method for pest control by modulation of insect GPCR biological activity. Substances having such activity can be discovered by the methods disclosed herein and include, but are not limited to, chemical compounds, antibodies, and gene products encoded by plant transgenes.

[0182] The present invention provides methods for preventing the onset or progression of a pest infestation in a plant. The method comprises administering a modulator of a GPCR set forth as any one of the even-numbered SEQ ID NOs:2-120, wherein modulation of the GPCR results in organismal lethality. Preferably, the lethality occurs during larval development.

[0183] IX.A. Formulation

[0184] An insect GPCR modulator of the present invention is typically formulated using acceptable vehicles, adjuvants, and carriers as desired. Representative formulations include emulsifiable concentrates, water-miscible liquids, wettable powders, water-soluble powders, oil solutions, flowable powders, aerosols, vapors, granulars, microcapsules, fumigants, ultra-low volume concentrates, fogging concentrates, vapors, impregnating materials, poison baits, and seed dressings. See, e.g., Perry et al. (1997) Insecticides in Agriculture and Environment: Retrospects and Prospects, pp. 7-10, Springer-Verlag, New York, N.Y. A formulation can be further selected based on its ability to improve insecticide properties such as storage, handling, application, effectiveness, safety to the applicator and the environment, and cost.

[0185] An insecticide formulation can further include a synergist that can enhance the activity of an insect GPCR modulator of the present invention. See Yamamoto (1973) in Casida, ed, Pyrethrum, The Natural Insecticide, pp.191-170, Academic Press, New York, N.Y.; Hodgson & Tate (1976) in Wilkinson, ed, Insecticide Biochemistry and Physiology, pp. 115-148, Plenum Press, New York, N.Y.; Wilkinson (1976a) in Tahori, ed, Proc 2^{nd} Int Congr on Pesticides and Chemistry, Vol. 2, pp. 117-159, Gordon & Breach, New York, N.Y.; Wilkinson (1976b) in Metcalf & McKelvey, eds, The Future for Insecticides: Needs and Prospects, Vol. 6, pp. 191-178, Wiley, New York, N.Y.; Casida & Quistad (1995) in Casida & Quistad, eds, Pyrethrum Flowers: Production, Chemistry, Toxicology, and Uses, pp. 258-276, Oxford University Press, New York, N.Y. Alternatively, synergism can be accomplished by treatment of a plant prior to application of an insect GPCR modulator, or by application of a synergist at sites on a plant distinct form sites of application of an insect GPCR modulator.

[0186] IX.B. In Vivo Assays

[0187] The insecticidal activity of a modulator of an insect GPCR can be tested using standard techniques in the art, including topical application, injection, dipping, contact or residual exposure, and feeding/drinking. See, e.g., Perry et al. (1997) Insecticides in Agriculture and Environment: Retrospects and Prospects, pp. 12-13, Springer-Verlag, New York, N.Y. As one example, a formulation comprising a modulator is sprayed on a plant, insect larvae are then applied to the plant, and after an appropriate temporal duration, a degree of plant destruction by the larvae is quantitated.

[0188] IX.C. Dose and Administration

[0189] The toxicity of an insecticide to an organism can be expressed in terms of the amount of compound per unit weight of the organism required to kill 50% of the test population, also referred to as the lethal dose (LD₅₀). The LD₅₀ is usually expressed in milligrams per kilogram of body weight or micrograms per insect. The lethal concentration (LC₅₀) is the concentration of a compound in an external medium that is required to kill 50% of the test population, and is expressed as the percentage or parts per million (ppm) of the active ingredient (Al) in the medium. This value can be used when the exact dose administered to an insect cannot be determined. The effectiveness of a candidate insecticidal substance can also be assayed in terms of lethal time (LC₅₀). LC₅₀ represents the time required to elicit 50% mortality of the test organisms at a specified dose or concentration and is a suitable measure for field tests.

[0190] In some instances, a rate of knockdown rather than lethality is measured as a criterion of effectiveness. In such cases the knockdown dose (KD₅₀) or the knockdown time (KT₅₀) can be used to express insecticidal activity.

[0191] The present invention also envisions the identification of insecticidal substances wherein killing or knockdown does not constitute the desired criterion. For example, useful assays can also assess non-lethal measures such as, for example, progression to developmental stages, fecundity, egg viability, attractant or repellant activity, paralysis, and anti-feeding activity.

[0192] Insect GPCR modulators identified in accordance with methods of the present invention are useful for preventing or treating an insect infestation, and in some cases a nematode infestation, in a plant or animal. Prevention and treatment methods employ an effective amount of the modulator. The term “effective amount” as used herein refers to an amount effective to prevent or ameliorate infestation.

[0193] An effective amount can comprise a range of amounts. One skilled in the art can readily assess the potency and efficacy of an insect GPCR modulator of the present invention and adjust the administration regimen accordingly. A modulator of insect GPCR biological activity can be evaluated by a variety of techniques, for example, by using a responsive reporter gene in an transcriptional assay, by assaying interaction of insect GPCR polypeptides with a monoclonal antibody, or by assaying insect viability when a modulator is administered to an insect, each technique described herein. One of ordinary skill in the art can tailor the dosages to a particular application, taking into account the particular formulation and method of administration to be used with the composition as well as the type of plant or animal, the development stage of the plant or animal, and the severity of the infestation to be treated.

[0194] IX.D. Transgenic Plants

[0195] The present invention also encompasses methods for pest control wherein an insect GPCR modulator is expressed in a plant. Preferably, a nucleic acid, peptide or polypeptide encoded by a transgene in a plant modulates the activity of any of SEQ ID NOs:1-119. In one embodiment, a transgene can encode a peptide that specifically binds an insect GPCR of the present invention. In another embodiment, a construct encoding an antibody that specifically binds an insect GPCR of the present invention can be expressed in plants to confer insect control. See, e.g., U.S. Pat. No. 5,686,600, the contents of which are herein fully incorporated by reference. Methods for generating a transgenic plant are known in the art and are discussed further herein below.

[0196] IX.E. Target Organisms

[0197] Insect GPCR modulators discovered according to the methods disclosed herein can be used for the prevention or amelioration of a pest infestation. The term “pest” as used herein refers to any organism that damages a plant, including mature plants, seedlings, and stored grain. The term “pest” also refers to any organism that causes disease in an animal. The compositions and methods disclosed herein are envisioned to be particularly useful to prevent or to treat infestation of insect pests, including but not limited to aphids, locusts, spider mites, boll weevils, and pests which attack stored grains (e.g., Tribolium and Tenebrio). The present disclosure is also relevant to methods for controlling soil nematodes and plant-parasitic nematodes such as Melooidogyne.

[0198] XI. Transgenic Plants

[0199] The present invention envisions expression of insect GPCR modulators, antibodies, dsRNA, antisense RNA or components of a GPCR in plants. Representative techniques for transforming dicotyledonous and monocotyledonous plants are described herein below.

[0200] The phrase “a plant, or parts thereof”, as used herein shall mean an entire plant; and shall mean the individual parts thereof, including but not limited to seeds, leaves, stems, and roots, as well as plant tissue cultures. Transgenic plants of the present invention are understood to encompass not only the end product of a transformation method, but also transgenic progeny thereof.

[0201] Representative plants that can be used in transgenic methods disclosed herein include but are not limited to rice, wheat, barley, rye, corn, potato, carrot, sweet potato, sugar beet, bean, pea, chicory, lettuce, cabbage, cauliflower, broccoli, turnip, radish, spinach, asparagus, onion, garlic, eggplant, pepper, celery, carrot, squash, pumpkin, zucchini, cucumber, apple, pear, quince, melon, plum, cherry, peach, nectarine, apricot, strawberry, grape, raspberry, blackberry, pineapple, avocado, papaya, mango, banana, tobacco, tomato, sorghum and sugarcane.

[0202] XI.A. Promoters

[0203] For in vivo production of an insect GPCR modulator or a chimeric receptor expression cassette in plants, exemplary constitutive promoters are derived from the CaMV 35S, rice actin, and maize ubiquitin genes. See Binet et al. (1991) Plant Sci 79:87-94, Christensen et al. (1989) Plant Mol Biol 12:619-632, Callis et al. (1990) J Biol Chem 265:12486-12493, Norris et al. (1993) Plant Mol Biol 21:895-906, European Patent Application Nos. 0 342 926 and 0 392 225, Taylor et al (1993) Plant Cell Rep 12:491-495, McElroy et al (1990) Plant Cell 2:163-171, McEclroy et al. (1991) Mol Gen Genet 231:150-160, Chibbar et al. (1993) Plant Cell Rep 12:506-509. Representative inducible promoters suitable for use with the present invention include the chemically inducible PR-1 promoter, the PR-1a promoter, an ethanol-inducible promoter, a glucocorticoid inducible promoter, and a wound-inducible promoter. See Uknes et al. (1992) Plant Cell 4:645-656, Lebel et al. (1998) Plant J 16:223-233, Caddik et al. (1998) Nat Biotechnol 16:177-180, Aoyama & Chua (1997) The Plant Journal 11:605-612, Xu et al. (1993) Plant Mol Biol 22:573-588; Logemann et al. (1989) Plant Cell 1:151-158, Rohrmeier & Lehle (1993) Plant Mol Biol 22:783-792, Firek et al. (1993) Plant Mol Biol 22:129-142, and Warner et al. (1993) Plant J 3:191-201. Selected promoters can direct expression in specific cell types (such as leaf epidermal cells, mesophyll cells, root cortex cells) or in specific tissues or organs (roots, leaves or flowers, for example). Representative promoters that direct cell- or tissue-specific expression in plants and can be used in accordance with the present invention include but are not limited to a root-specific promoter (de Framond (1991) FEBS 290:103-106, U.S. Pat. No. 5,466,785), a pith-preferred promoter (International Publication No. WO 93/07278), a leaf-specific promoter (Hudspeth & Grula (1989) Plant Mol Biol 12:579-589), and a pollen-specific promoter (International Publication No. WO 93/07278).

[0204] XI.B. Vectors

[0205] The expression cassette is cloned into a vector suitable for transformation. Suitable expression vectors which can be used include, but are not limited to, the following vectors or their derivatives: plant transformation vectors, viruses such as vaccinia virus or adenovirus, baculovirus vectors, yeast vectors, bacteriophage vectors (e.g., lambda phage), plasmid and cosmid DNA vectors, and transposon-mediated transformation vectors.

[0206] Numerous vectors available for plant transformation are known to those of ordinary skill in the plant transformation arts, and the genes pertinent to this invention can be used with any such vectors. Exemplary vectors include pCIB200, pCIB2001, pCIB10, pCIB3064, pSOG19, and pSOG35. The selection of vector will depend upon the preferred transformation technique and the target species for transformation.

[0207] Many vectors are available for transformation using Agrobacterium tumefaciens. These typically carry at least one T-DNA border sequence and include vectors such as pBIN19 (Bevan (1984) Nuc Acids Res 12:8711-8721) and pXYZ. See also European Patent Application No. 0 332 104, herein incorporated by reference.

[0208] Transformation without the use of Agrobacterium tumefaciens circumvents the requirement for T-DNA sequences in the chosen transformation vector and consequently vectors lacking these sequences can be utilized in addition to vectors such as the ones described above which contain T-DNA sequences. Transformation techniques that do not rely on Agrobacterium include transformation via particle bombardment, protoplast uptake (e.g., electroporation), and microinjection. The choice of vector depends largely on the preferred selection for the plant species being transformed.

[0209] For certain target species, different antibiotic or herbicide selection markers can be preferred. Selection markers used routinely in transformation include the nptII gene, which confers resistance to kanamycin and related antibiotics (Messing & Vierra (1982) Gene 19: 259-268; Bevan et al. (1983) Nature 304:184-187), the bar gene, which confers resistance to the herbicide phosphinothricin (White et al. (1990) Nuc Acids Res 18:1062, Spencer et al. (1990) Theor Appl Genet 79:625-631), the hph gene, which confers resistance to the antibiotic hygromycin (Blochlinger & Diggelmann (1984) Mol Cell Biol 4:2929-2931), and the dhfr gene, which confers resistance to methatrexate (Bourouis et al. (1983) EMBO J 2(7):1099-1104), the EPSPS gene, which confers resistance to glyphosate (U.S. Pat. Nos. 4,940,935 and 5,188,642), and the mannose-6-phosphate isomerase gene, which provides the ability to metabolize mannose (U.S. Pat. Nos. 5,767,378 and 5,994,629).

[0210] XI.C. Transformation of Dicotyledons

[0211] Transformation techniques for dicotyledons are known in the art and include Agrobacterium-based techniques and techniques that do not require Agrobacterium. Non-Agrobacterium techniques involve the uptake of exogenous genetic material directly by protoplasts or cells. This can be accomplished by polyethylene glycol (PEG) electroporation, particle bombardment-mediated uptake, or microinjection. Examples of these techniques are described by Paszkowski et al. (1984) EMBO J 3:2717-2722; Potrykus et al. (1985) Mol Gen Genet 199:169-177; Reich et al. (1986) Biotechnology 4:1001-1004; Klein et al. (1987) Nature 327:70-73; and U.S. Pat. Nos. 4,945,050, 5,036,006, and 5,100,792. Using any of the afore-mentioned methods, the transformed cells can be regenerated to whole plants using standard techniques known in the art.

[0212] XI.D. Transformation of Monocotyledons

[0213] Transformation of most monocotyledon species has now also become routine. Preferred techniques include direct gene transfer into protoplasts using PEG or electroporation techniques, and particle bombardment into callus tissue. See European Patent Application Nos. 0 292 435, 0 392 225, and 0 332 581; International Publication Nos. WO 93/07278 and WO 93/21335; Gordon-Kamm et al. (1990) Plant Cell 2:603-618; Fromm et al. (1990) Biotechnology 8:833-839; Koziel et al. (1993) Biotechnology 11:194-200; Zhang et al. (1988) Plant Cell Rep 7:379-384; Shimamoto et al. (1989) Nature 338:274-277; Datta et al. (1990) Biotechnology 8:736-740; Christou et al. (1991) Biotechnology 9:957-962; Vasil et al. (1992) Biotechnology 10:667-674; Vasil et al. (1993) Biotechnology 11:1553-1558; and Weeks et al. (1993) Plant Physiol 102:1077-1084. More recently, transformation of monocotyledons using Agrobacterium has been described. See International Publication No. WO 94/00977 and U.S. Pat. No. 5,591,616, both of which are incorporated herein by reference.

[0214] XII. Methods of Inducible Gene Expression

[0215] The present invention further provides a method of controlling gene expression in an organism, the method comprising: (a) transforming the organism with a receptor expression cassette comprising a 5′ regulatory region capable of promoting expression operatively linked to a receptor cassette encoding a chimeric receptor polypeptide of the invention, and a 3′ terminating region; (b) transforming the organism with a target expression cassette comprising a 5′ regulatory region operatively linked to a target nucleotide sequence, wherein the 5′ regulatory region comprises one or more response elements that are regulated by G protein signaling; (c) expressing the chimeric receptor polypeptide in the organism; and (d) contacting the organism with a chemical ligand that binds to the ligand binding domain of the chimeric receptor polypeptide, whereby the chimeric receptor polypeptide activates expression of the target nucleotide sequence through a G protein signaling pathway.

[0216] In a preferred embodiment, GPCR cassettes comprising disclosed GPCR sequences are useful for the regulation of expression of target polypeptides in plants in the presence of appropriate chemical ligands. For example, U.S. Pat. No. 5,880,333 is drawn to a method for controlling gene expression in plants comprising transforming a plant with expression cassette encoding a nuclear receptor polypeptide and a target sequence. The method is useful for controlling various traits of agronomic importance.

[0217] The present invention provides for the production of plants containing GPCR antagonist RNAs. These antagonistic RNAs are typically derived from plant transgenes containing antisense oriented genes or from transgenes that make mRNAs that have the ability to fold to make a hairpin structure (Patel and Jacobs-Lorena (1988) Proceedings of the National Academy of Science: 85, 9601; Zhao and Pick (1993) Nature 365, 448; Lam and Thummel (2000) Current Biology 10, 957. Insects consuming plant material containing these RNAs would have reduced viability due to a decrease in the essential GPCR transcript level.

### EXAMPLES

[0218] The following Examples have been included to illustrate modes of the invention. Certain aspects of the following Examples are described in terms of techniques and procedures found or contemplated by the present co-inventors to work well in the practice of the invention. These Examples illustrate standard laboratory practices of the co-inventors. In light of the present disclosure and the general level of skill in the art, those of skill will appreciate that the following Examples are intended to be exemplary only and that numerous changes, modifications, and alterations can be employed without departing from the scope of the invention.

### Example 1

### Database Searches

[0219] To identify new Drosophila proteins, a database of predicted proteins (referred to herein as “the GeneMark database”) was assembled using the GeneMark program (Borodovsky & McIninch (1993) Computers & Chemistry 17:123-133) and template 50 kilobase genomic sequence scaffolds generated by Celera Corp. (Rockville, Md.). A second predicted protein database generated by Celera using an alternative protein prediction program was also used (referred to herein as “the Celera database”).

[0220] Eleven Class A GPCRs from vertebrate (either human or mouse) representing all sub-catagories of Class A were used to BLAST the GeneMark database and the Celera database. Twelve Class B and two Class C GPCRs were also used to BLAST the same databases. The results of the BLAST searches were examined and predicted proteins likely to be GPCRs were identified. A highly conserved region of cytoplasmic loop two was then used to generate Hidden Markov Model (HMM) profiles for Class A and Class B according to the HMMER 2.1.1 program (available from Washington University School of Medicine, St. Louis, Mo.). HMMER 2.1.1 hmmbuild parameters were selected for maximal sensitivity. The profile HMM was further calibrated according to the program instructions. This profile HMM was used to query the GeneMark and Celera databases to identify any Drosophila GPCRs that do not have a vertebrate homolog. The GeneMark and Celera protein predictions for each novel Drosophila GPCR were then BLASTED against the non-redundant set of GenBank. The prediction with the lower E-value score was identified and judged to be the prediction on which cloning would be based.

### Example 2

### Isolation of Drosophila melanogaster GPCR cDNAs

[0221] cDNA clones of Drosophila GPCRs were cloned by PCR using a first strand Drosophila cDNA pool as template. PCR primers were designed to include the predicted start and stop codons of each receptor using the primer3 application (available through Whitehead/MIT Center for Genome Research of Cambridge, Mass.). Amplified products were cloned in the pUNI/V5-His-TOPO or pCR2.1-TOPO vectors (Invitrogen Corp. of Carlsbad, Calif.). Cloned inserts were sequenced on both strands by primer walking using an ABI PRISM® 3700 DNA Analyzer (Applied Biosystems of Foster City, Calif.) to an accuracy of <1/10,000 nucleotide errors.

### Example 3

### Cloning the Heliothis virescens Octopamine GPCR by PCR

[0222] PolyA+ RNA was made from Heliothis virescens larval gut tissue. cDNA was prepared by reverse transcription using random primers and a Gene Amp kit (Perkin Elmer of San Jose, Calif.). The reverse transcription reaction was allowed to proceed for 15 minutes at 42C, and then stopped by incubating the reaction for 5 minutes at 99C. For amplification of the octopamine receptor, nested, degenerate primers were designed according to the amino acid sequence of the Drosophila OAMB receptor and a barnacle octopamine receptor (forward degenerate primer: 5′gcatgtctagaggngaybtntggtgyhsnrtntgg 3′ (SEQ ID NO:109) and the reverse degenerate primer: 5′gcatgaagcttngtyttngcngcyttngtytccat 3′ (SEQ ID NO:110). Primers included XbaI and HindIII restriction sites for cloning into pBluescript (Stratagene of La Jolla, Calif.). Cycling parameters for amplification using degenerate primers were as follows: initial amplification for 105 seconds at 95C; 30 cycles—20 seconds at 95C, 30 seconds at 63C, 2 minutes at 72C; final amplification for 7 minutes at 72C; hold at 4C. Each sample was purified over a Qiagen PCR Purification column/kit and used as template in a second amplification step identical to the first. An approximately 1.1 kb band was identified from sequencing as the Heliothis virescens octopamine receptor.

[0223] Amplification of cDNA ends was performed using a MARATHON RACE kit (Clonetech Laboratories, Inc. of Palo Alto, Calif.). Gene specific primers (5′RACE Primer: 5′ggatggaagccgtgcacatccayacg 3′ (SEQ ID NO: 111 and 3′RACE Primer: 5′ ggcagggaactgacggagagcagg 3′ (SEQ ID NO: 112) were designed according to Heliothis virescens octopamine receptor sequences obtained as described herein above. cDNA libraries generated from Heliothis virescens larval gut were used as template. RACE products were cloned into the TOPO-A vector (Invitrogen Corporation of Carlsbad, Calif.).

[0224] Nucleotide Code: n=inosine, Y=C+T, H=A+T+C, B=G+T+C, S=G+C, R=A+G

### Example 4

### Double-Stranded RNA Interference

[0225] Preparation of dsRNA for Injection. Sequences to be expressed as dsRNA were cloned into Bluescript KS(+) (Stratagene of La Jolla, Calif.), linearized with the appropriate restriction enzymes, and transcribed in vitro with the Ambion T3 and T7 Megascript kits following the manufacturer's instructions (Ambion Inc. of Austin, Tex.). Transcripts were annealed in injection buffer (0.1 mM NaPO₄ pH 7.8, 5 mM KCl) after heating to 85° C. and cooling to room temperature over a 1- to 24-hr period. All annealed transcripts were analyzed on agarose gels with DNA markers to confirm the size of the annealed RNA and quantitated as described previously (Fire et al. (1998) Nature 391(6669):806-811). Injected RNA was not gel-purified. Injection of 0.1 nl of a 0.1- to 1.0-mg/ml solution of a 1-kb dsRNA corresponds to roughly 10⁷ molecules/injection.

[0226] Injection of Drosophila melanogaster Embryos. Fly cages were set up using 2- to 4-day flies. Agar-grape juice plates were replaced every hour to synchronize the egg collection for 1-2 days. The eggs were collected over a 30- to 60-min period for subsequent injection. The eggs were washed into a nylon mesh basket with tap water. The chorion was removed by brief soaking in a dilute bleach solution. Eggs were positioned on a glass slide such that each egg was in a same orientation. Double-stranded RNA was injected into middle of each egg using an Eppendorf transjector (Eppendorf Scientific, Inc. of Westbury, N.Y.). Following injection, slides were stored in a moist chamber to prevent dessication of the embryos. Embryos were monitored for development and transferred as first instar larvae to vials containing Drosophila medium. Methods for rearing Drosophila staging and common genetic techniques can be found, for example, in Roberts (1986) Drosophila melanogaster, A Practical Approach, IRL Press, Washington, D.C.; Ashburner (1989a) Drosophila: A Laboratory Handbook, Cold Spring Harbor Laboratory Press, New York, N.Y.; Ashburner (1989b) Drosophila: A Laboratory Manual, Cold Spring Harbor Laboratory Press, New York, N.Y.; Goldstein & Fyrberg, eds (1994) in Methods in Cell Biology, Vol. 44, Academic Press, San Diego, Calif.

### Example 5

### Expression Pattern Analysis of Drosophila GPCRs by in Situ Hybridization

[0227] Wild-type Drosophila melanogaster (strain Oregon R) were obtained from the public Stock Center of Bloomington, Indiana (http://flystocks.bio.indiana.edu). Embryos were collected on grape juice/agar plates at room temperature for approximately 16 hours. Larvae of the wandering 3^{rd} instar stage were dissected such that all internal tissues of the animal were subject to detection. Embryos and larvae were fixed, processed and detected according to the method described by Berleley Drosophila Genome Project website (http://www.fruitfly.org/about/methods/RNAinsitu.html. Following staining, tissues were dissected apart and mounted in 70% Glycerol and examined on a compound microscope. A sense strand control for the wingless gene showed no staining, while the antisense strand displayed the correct expression pattern for wingless. The pattern of expression for each GPCR was recorded by digital photography and are described below in Table 6. Most GPCRs examined have expression in either embryos, larvae or both. Table 6 (GPCR expression) details which GPCRs have expression in which tissues.

TABLE 6
Expression Profile of GPCRs

| | | | larval | larval | | larval | expression |
|---|---|---|---|---|---|---|---|
| | ubiquitous | larval | gut | body wall | larval | Malpighian | in |
| gene | larval | brain | neurons | neurons | gut | tubules | embryos |
| 5-HT1A 56A | x | | | | | | |
| 5-HT2 82C4 | | | | | | | x |
| 5-HT7 100A2 | | | | | x | | |
| Adenosine 99E1 | | | x | x | | | |
| Adrenergic 64C | | x | | | | | |
| Adrenergic 60D1 | | x | | | | | |
| Allatostatin 3E1 | | | | | | | |
| Calcitonin 49F9 | | | | | x | | |
| CCK-X 26A1 | | | | | x | | |
| DiureticHor2 51A1 | | x | | | | | |
| DopR 88B1 | | x | | | | | |
| Galanin 98E2 | | | x | | | x | |
| Gastrin 17E3 | | x | | | x | | |
| GRHR 27A2 | | | | | x | | |
| Histamine 97B | | x | | | x | | |
| He6Receptor 100B1 | | | | | x | | |
| Latrophilin 44D4 | x | | | | | | x |
| Lymnokinin 64D3 | | x | | | | x | |
| mAcR 60C | | x | | | | | |
| Mthlike 1 | | | | | | x | |
| Mthlike 3 | | | | | x | | |
| Neuro Y-like 77A1 | | x | | | | | |
| NeuroYY 26B1 | | | | | x | | |
| Neuro YY-like 83 | | x | x | | x | x | |
| NeuropepYR 97E1 | | x | | | | | |
| Octopamine 90C2 | | | | | x | | |
| Prostaglandin 74F1 | | | | | x | | |
| TakR 86C | | x | | | x | | |
| TakR 99D | | | | | | x | |
| Wormlike 47E | | x | | | x | | |
| Wormlike 4F9 | | x | | | | | |

### Example 6

### Recombinant Production of in E. coli

[0228] A cDNA clone of the present invention is subcloned into an appropriate expression vector and transformed into E. coli using the manufacturer's conditions. Specific examples include plasmids such as pBluescript (Stratagene of La Jolla, Calif.), pFLAG (International Biotechnologies, Inc. of New Haven, Connetticut), and pTrcHis (Invitrogen Corp. of Carlsbad, Calif.). E. coli are cultured, expression of the recombinant protein is confirmed, and recombinant protein is isolated using standard techniques.

### Example 7

### Recombinant Production of a GPCR in Insect Cells

[0229] Baculovirus vectors, which are derived from the genome of AcNPV virus, are designed to provide high levels of expression of cDNA in the Spodoptera frugiperda (SF9) line of insect cells (ATCC CRL# 1711). Recombinant baculovirus expressing the cDNA of the present invention is produced by the following standard methods (Invitrogen MaxBac Manual, Invitrogen Corporation of Carlsbad, Calif.): cDNA constructs are ligated into the polyhedrin gene in any one of a variety of baculovirus transfer vectors, including the pAC360 and the BleBAc vector (Invitrogen Corp. of Carlsbad, Calif.). Recombinant baculoviruses are generated by homologous recombination following co-transfection of the baculovirus transfer vector and linearized AcNPV genomic DNA (Kitts (1990) Nucleic Acid Res 18:5667) into SF9 cells. Recombinant pAC360 viruses are identified by the absence of inclusion bodies in infected cells and recombinant pBlueBac viruses are identified on the basis of β-galactosidase expression (Summers & Smith, Texas Agriculture Exp Station Bulletin No. 1555).

[0230] A cDNA encoding an entire open reading frame for the gene is inserted into the BamH I site of pBlueBacII (Invitrogen Corp. of Carlsbad, Calif.). Constructs in the positive orientation, identified by sequence analysis, are used to transfect SF9 cells in the presence of linear AcNPV wild type DNA. The recombinant insect GPCR is present in the plasma membrane of infected cells. The recombinant insect GPCR is extracted from infected cells by hypotonic or detergent lysis.

### Example 8

### In Vitro Binding Assays

[0231] Recombinant protein can be obtained, for example, according to the approach described in Example 6 or 7 herein above. The protein is immobilized on chips appropriate for ligand binding assays. The protein immobilized on the chip is exposed to a candidate substance according to methods known in the art. While the sample compound is in contact with the immobilized protein, measurements capable of detecting protein-ligand interactions are conducted. Measurement techniques include, but are not limited to, SEDLI, Biacore, and FCS, as described above. Substances that bind the protein are readily discovered using this approach and are subjected to further characterization.

### Example 9

### Cell-Based Activity Assay

[0232] The cell-based assay is used to detect G-protein Coupled receptor activity, and is performed as essentially described in the protocol provided by Euroscreen (Brussels, Belgium). The GPCR of interest is stably transformed into a recombinant cell line expressing the apoaequorin gene at a high level (AequoScreen™). When the GPCR is activated by an agonist, the heterotrimeric G proteins will activate the enzyme phospholipse Cβ (PLCB). PLCβ then cleaves the phospholipid, phosphatidylinositol 4, 5 bisphosphate (PIP2) to generate diacylglycerol (DAG) and inositol triphosphate (IP3). IP3 binds to the IP3 receptor and releases Ca²⁺ from the intracellular stores. Cells are incubated with coelenterazine, that readily crosses the cell membranes and conjugates to apoaequorin to form aequorin. The activity of the aequorin enzyme is that it emits light upon oxidation of coelenterazine but is dependent on the calcium concentration in its environment. The basal activity of aequorin is very low in the absence of stimulation of the GPCR. When the cells are exposed to an agonist of the GPCR, the rise of intracellular calcium concentration activates the aequorin enzyme, giving a flash luminescence signal. The intensity of the light emission is proportional to the increase in intracellular calcium.

[0233] The references cited in the specification are incorporated by reference herein in their entirety.

[0234] It will be understood that various details of the invention can be changed without departing from the scope of the invention. Furthermore, the foregoing description is for the purpose of illustration only, and not for the purpose of limitation—the invention being defined by the claims appended hereto.

What is claimed is:

1. An isolated polypeptide comprising:
(a) a polypeptide encoded by the nucleotide sequence of any one of odd numbered sequences SEQ ID NOs:1-107;
(b) a polypeptide encoded by a nucleic acid molecule that is substantially identical to any one of odd numbered sequences SEQ ID NOs:1-107;
(c) a polypeptide comprising the amino acid sequence of any one of even numbered sequences SEQ ID NOs:2-108;
(d) a polypeptide that is a biological equivalent of the polypeptide of any one of even numbered sequences SEQ ID NOs:2-108; or
(e) a polypeptide which is immunologically cross-reactive with an antibody that shows specific binding with a polypeptide of any one of even numbered sequences SEQ ID NOs:2-108.

2. An isolated nucleic acid molecule comprising:
(a) a nucleotide sequence of any one of odd numbered sequences SEQ ID NOs:1-107; or
(b) a nucleic acid molecule substantially identical to any one of odd numbered sequences SEQ ID NOs:1-107.

3. A chimeric gene, comprising the nucleic acid molecule of claim 2 operatively linked to a heterologous promoter.

4. A vector comprising the chimeric gene of claim 3.

5. A host cell comprising the chimeric gene of claim 3.

6. The host cell of claim 5, wherein the cell is selected from the group consisting of a bacterial cell, an insect cell, and a plant cell.

7. A method of detecting a nucleic acid molecule that encodes G-protein coupled receptor polypeptide, the method comprising:
(a) procuring a biological sample comprising nucleic acid material;
(b) hybridizing the nucleic acid molecule of claim 2 under stringent hybridization conditions to the biological sample of (a), thereby forming a duplex structure between the nucleic acid of claim 2 and a nucleic acid within the biological sample; and
(c) detecting the duplex structure of (b), whereby a nuclear receptor nucleic acid molecule is detected.

8. An antibody that specifically recognizes a polypeptide of claim 1.

9. A method for producing an antibody that specifically recognizes a G protein-coupled receptor polypeptide, the method comprising:
(a) recombinantly or synthetically producing an insect nuclear receptor polypeptide, or portion thereof, as set forth in any of even numbered sequences SEQ ID NOs:2-108;
(b) formulating the polypeptide of (a) whereby it is an effective immunogen;
(c) administering to an animal the formulation of (b) to generate an immune response in the animal comprising production of antibodies, wherein antibodies are present in the blood serum of the animal; and
(d) collecting the blood serum from the animal of (c), the blood serum comprising antibodies that specifically recognize a nuclear receptor polypeptide.

10. A method for detecting a level of G protein-coupled receptor polypeptide, the method comprising
(a) obtaining a biological sample comprising peptidic material; and
(b) detecting a G protein-coupled receptor polypeptide in the biological sample of (a) by immunochemical reaction with the antibody of claim 8, whereby a level of G protein-coupled receptor polypeptide in a sample is determined.

11. A method for identifying a substance that modulates G protein-coupled receptor function, the method comprising:
(a) isolating a G protein-coupled receptor polypeptide of claim 1;
(b) exposing the isolated G protein-coupled receptor polypeptide to a plurality of candidate substances;
(c) assaying binding of a candidate substance to the isolated nuclear receptor polypeptide; and
(d) selecting a candidate substance that demonstrates specific binding to the isolated G protein-coupled receptor polypeptide.

12. A method for identifying an insecticidal substance that modulates G protein-coupled receptor function, the method comprising:
(a) isolating a G protein-coupled receptor polypeptide of any one of even numbered SEQ ID NOs:2-108, wherein modulation of the insect G protein -coupled receptor polypeptide confers lethality of an insect during a larval stage;
(b) exposing the isolated G protein-coupled receptor polypeptide to a plurality of substances;
(c) assaying binding of a substance to the isolated G protein-coupled receptor polypeptide; and
(d) selecting a substance that demonstrates specific binding to the isolated G protein-coupled receptor polypeptide.

13. A method for preventing or abrogating an insect infestation of a plant, the method comprising:
(a) preparing an insecticidal composition that includes an G protein -coupled receptor modulator identified according to the method of claim 12; and
(b) contacting an effective dose of the insecticidal composition with a plant, whereby an insect infestation of a plant is prevented or abrogated.

14. The method of claim 13, wherein the insecticidal composition comprises a chemical compound, a protein, a peptide, a nucleic acid, or an antibody.

15. A method for preventing or abrogating a nematode infestation of a plant, the method comprising:
(a) preparing an insecticidal composition that includes a G protein -coupled receptor modulator identified according to the method of claim 12; and
(b) contacting an effective dose of the insecticidal composition with a plant, whereby a nematode infestation of a plant is prevented or abrogated.

16. A method for preventing or abrogating an insect infestation of a plant, the method comprising expressing in a plant a G protein-coupled receptor modulator that modulates the activity of a G protein-coupled receptor polypeptide of claim 1, whereby an insect infestation of the plant is prevented or abrogated.

17. The method of claim 16, wherein the bioactive agent comprises a protein, a peptide, a nucleic acid, or an antibody.

18. A method for preventing or abrogating a nematode infestation of a plant, the method comprising expressing in a plant a bioactive agent that modulates the activity of a G protein-coupled receptor polypeptide of claim 1, whereby a nematode infestation of the plant is prevented or abrogated.

19. A chimeric G protein-coupled receptor cassette comprising a DNA binding domain, a ligand binding domain, and an activation or repression domain, wherein one or more of the DNA binding domain, the ligand binding domain, and the activation domain comprises an amino acid sequence that is identical or substantially identical to a portion of any one of even numbered sequences SEQ ID NOs:2-108.

20. A method of inducing expression of a target nucleotide sequence, the method comprising:
(a) constructing a chimeric G protein-coupled receptor expression cassette of claim 19; and
(b) constructing a target expression cassette having a target nucleotide sequences and a cis-regulatory element that is recognized by a DNA-binding domain of the chimeric G protein-coupled receptor expression cassette;
(c) expressing the chimeric G protein-coupled receptor expression cassette and the target expression cassette in a heterologous organism; and
(d) contacting a ligand that binds to the ligand binding domain of the chimeric G protein-coupled receptor expression cassette with the organism, whereby the target nucleotide sequence is expressed.

21. The method of claim 20, wherein the heterologous organism is a plant.

The application's sequence listing, which the Patent Office published only in electronic form, follows.

SEQUENCE LISTING (112 sequences)

SEQ ID NO: 1 - DNA, 2325 bp, Drosophila melanogaster
  CDS (1)..(2325)
atgtccgcgtttcgctacttctcgatcaccgacttctccttcgagggacctctgctaccgctgcacgcggccaccacgagcaaggatgccaaggactcggacagccccagttccgagctgaacataccctacaccgtcttcgaggtcctggtggccatcgtcagcatcatcggcaacgtgctggtgatcatcgtcttccgccgggaaagaaagttgcgacgccgcaccaactactacatagtatccctggccatggccgatttgctagtgggcgcattgggtattcccttcgccatcctggcctccatgggactacccagaaaccttcatgcttgcctcttcacagtctccctgctcgtggtgctgtgtaccatctccatcttctgtctggtggccgtgtccgtggatcgatactgggccatcctatatccgatggcctactcaaggaatgtccgcacccgcacggcgattttcatcatatccatgtgctgggtggccgggacgatagtgggcttcctgccgcttttcggctggcacgccgatgtcaatcacaaccaggagtgcctcttcgtggaggtgatggactacaactacctcgtcttcctctattttgccaccattatcacaccggctctgctgatgctggccttctacacgcacatctaccgggtcatcatcaaacaggtccgtcagattgttacgatgaaccccgcctccgatctcagtcgtcgctcctcggcggccgtggtgcaggtgacgacacccggaagaggtggacacacgggaaccatgctgcgggtcttgggcgccgcaaggaagcgggacgtcaaggccacccagaatctgtccattatcgtgctgttctttatgatctgctggataccgctctatacgatcaactgcatcaaggccttctgtcccgactgttatgtgcatcccaagctgacgctcttctgcatcattctgtcccatctgaactcggcggtaaatcccgtcctgtatgcctatcacctcaaggattttcgggctgcgctgaagaacttactcctgaagatgatgggcgtcgacattgatcagcaggcggaggccatccaccgcttctcggtggccagtcagcatcgcctgcagtccatggactctaatatgcgctccacgcagccgcgcctctatgtgggtgagtattcacccatttggttgaggcagcagcaggaggccctgaagaactcccagctcctgcccaagtgcggagtggtgtcgccctgtttcaacaacatcaaccaaacggtggccgccgtggcttcggtgaccacagatctcgagcgagaaatgtggaacatagtggaggcctccagtggcgccgagctgggtgaaaccagctacgagttcccttcccccgctccgggttcccagcgcagcagtgaacgaaacagcagttccacagtcccaccagctcctcctgctcctgcgaggccctcagttccgtccgcctcctatgacaaccacaactacagtttcagccaggatgaggacgaagatgatgatgatctagagtttgaggacgtatttgtgccggccagctctgttccaaatcccgttcagcctggcatagatcccgtggaactgcgtcgctccctggctttggtcatgagggagaaattgcgatcggatgacacggactccaggccaatgggcaacaatcaggatcttcccatagatgaacagtccagggacagaccgctctccactcaaacatctcccacaaatggcccgcttccggctcttctgagggccaaactgcttgctggcaactccaatagcgctcactgcctgccaggatccacggcgagtcctgctccccaggagcaatccggtatctttgtgatcgatagtgaggcgagtcccggctcaaatgggcacaagcctaagtatcgaaagggcacggcattcactcggagttcgctgaagaagagccgatcctgcaactgtagctccatcgctaagggacgaggggtccacgacgagcccagcagtaatctctgcagggatcaggagtcctctgtacttccacagcatccgcagccagccaaccatcccacagagaacttctttagtccgctgagatcggtgggcagtttcatgcagcattccaacctgtttcacttcctccagcctcacgccgcccgtcccacctcatcgacggcgtcgtcctcggcctccacgcccactccatcaccaccgcccatgggtcaggctcaggaggaatcggttccagtgggtctgaccacctcctcgccgtcccttctggcgaccagcgcggagagttga

SEQ ID NO: 2 - protein, 774 aa, Drosophila melanogaster
MSAFRYFSITDFSFEGPLLPLHAATTSKDAKDSDSPSSELNIPYTVFEVLVAIVSIIGNVLVIIVFRRERKLRRRTNYYIVSLAMADLLVGALGIPFAILASMGLPRNLHACLFTVSLLVVLCTISIFCLVAVSVDRYWAILYPMAYSRNVRTRTAIFIISMCWVAGTIVGFLPLFGWHADVNHNQECLFVEVMDYNYLVFLYFATIITPALLMLAFYTHIYRVIIKQVRQIVTMNPASDLSRRSSAAVVQVTTPGRGGHTGTMLRVLGAARKRDVKATQNLSIIVLFFMICWIPLYTINCIKAFCPDCYVHPKLTLFCIILSHLNSAVNPVLYAYHLKDFRAALKNLLLKMMGVDIDQQAEAIHRFSVASQHRLQSMDSNMRSTQPRLYVGEYSPIWLRQQQEALKNSQLLPKCGVVSPCFNNINQTVAAVASVTTDLEREMWNIVEASSGAELGETSYEFPSPAPGSQRSSERNSSSTVPPAPPAPARPSVPSASYDNHNYSFSQDEDEDDDDLEFEDVFVPASSVPNPVQPGIDPVELRRSLALVMREKLRSDDTDSRPMGNNQDLPIDEQSRDRPLSTQTSPTNGPLPALLRAKLLAGNSNSAHCLPGSTASPAPQEQSGIFVIDSEASPGSNGHKPKYRKGTAFTRSSLKKSRSCNCSSIAKGRGVHDEPSSNLCRDQESSVLPQHPQPANHPTENFFSPLRSVGSFMQHSNLFHFLQPHAARPTSSTASSSASTPTPSPPPMGQAQEESVPVGLTTSSPSLLATSAES

SEQ ID NO: 3 - DNA, 1185 bp, Drosophila melanogaster
  CDS (1)..(1185)
atggctggccatcagtcgctggcacttttgttggccacgctaattagcagctggccaaaagcctcttggggcgccactggaaacggtagtatcataagcgttagcaacagcagtggcaacaactatgcattcacctcggaacacacggatcattcggatcacaatgccaacgactccatggaatatgatgcagagagtgtggccctcgaacggatcgtatccacaatagttcccgtattctttggcattatcggattcgcaggacttttgggcaatggtctggttattctggtggttgtggccaaccagcagatgcgctccaccaccaatctgctgataatcaacctggccgtctcggacattctgttcgtcatcttctgtgtcccgttcacggctaccgattacgtgctgccggagtggccgtttggcaatgtgtggtgcaagtttgtccagtacatgattgtggttacgtgccactgcagtgtttacacgctggtgctgatgtcctttgatcgcttcctggccgtcgttcatcccgtgactagcatgtccctgcgaacggagcgcaatgccacactggccatcatgtgcgcctggataacgattgtgacgactgcgattccggtggcactttcgcactcggtgaggatttatcagtaccacggaaatgctggcaccgcttgcgtcttttccacggaggaggagatctggagtctcgtcggttttcaggtctcattctttctatcgtcatatgtggcaccattgacgctgatttgtttcctatatatgggaatgctggctcgtctttggaaaagtgctcctggctgcaaaccttccgcagagtcacgaaagggaaaaaggcgcgtcacccgaatggttgttgttgtcgtattggcattcgccatctgttggctgcccattcatgtcatcctcgtgcttaaggcactgaatctttatggcggcagccacttatcggtcattattcagattatatcccatgtggtggcgtacacgaattcgtgcatcaatccgatactgtatgcctttctatccgacaactttcgcaaggcattccgcaaggtggtctggtgtggaagtccgccacctttgatgaccaatcaacaggtgaccaagacaacgcgaactgcaaccggaaacggaacgtccaatattgaaatgctctaa

SEQ ID NO: 4 - protein, 394 aa, Drosophila melanogaster
MAGHQSLALLLATLISSWPKASWGATGNGSIISVSNSSGNNYAFTSEHTDHSDHNANDSMEYDAESVALERIVSTIVPVFFGIIGFAGLLGNGLVILVVVANQQMRSTTNLLIINLAVSDILFVIFCVPFTATDYVLPEWPFGNVWCKFVQYMIVVTCHCSVYTLVLMSFDRFLAVVHPVTSMSLRTERNATLAIMCAWITIVTTAIPVALSHSVRIYQYHGNAGTACVFSTEEEIWSLVGFQVSFFLSSYVAPLTLICFLYMGMLARLWKSAPGCKPSAESRKGKRRVTRMVVVVVLAFAICWLPIHVILVLKALNLYGGSHLSVIIQIISHVVAYTNSCINPILYAFLSDNFRKAFRKVVWCGSPPPLMTNQQVTKTTRTATGNGTSNIEML

SEQ ID NO: 5 - DNA, 1902 bp, Drosophila melanogaster
  CDS (1)..(1902)
atgagtgatgagacaactattagcctggaggacggctatccccccctggaggcgttgacaactatggttcccccggcggacgcgactggtttttcgcagtcgcttttgacatttgccgcggtcatgacctttctcataatgatcgtgggcatatgcggcaacctgttgaccgtagtggccctgctgaaatgtcccaaggtgcgcaacgtggcggctgcctttatcatcagcctctgtattgccgacctgctcttctgcgccctggtgctgccattccagggtctgcggttcgtccaaggaacctggcgacatggccaggtgctgtgccgcctcattccctttatccaatacggaaacataggggtatccctgttgtgcatcgcaatgatcacgatcaatcggtatgtgatgatcacacatcacggactttatgccaggatctataaacgccactggattgcggtaatgatcgccgcctgctggctgttctcctacggcatgcagctcccgacgcttctgggagagtggggtcgctttggctacgactcgagattacagacctgctccatcatgaccgacgaccatgggcacagcagcaagacgacgttgtttatcaccgccttcgtcatcccttgcctggttatcattgcctgctatgccaagatcttctgggtggtccacaagtcggagcagcgcttgaagcgccatgccaccaaacaaaactccatacccaacaacctgcgccccctagcctctacaggatcaggtgccctgccctccggcgcggaatgccagccaagcaaccgcgtctcctcggacagcagcagtagcttctccatcgatgtgccggagacagcgcccagcggcaaacagcagccaacccgagtcaacgatcagcgtgaagtacgtgccaagcgaaacgagtggcgcatcactaagatggtgctggccatcttcctgtccttcgtcgtctgctacttgcccatcacaattgttaaggtggccgacaagaatgtggagcaccccagcctgcacatctgcagctatatcctgctctacctgtcggcttgtattaatccgatcatctatgtcatcatgaacaagcagtaccgcaaggcctacaagacggtggttttctgtcagcccgcccgtcttctgctgcccttcgggaagaccaatggcgctagcagcgcagcagaaatggaaagataccgggttgagcaacaaccacagccgcacaatcgtctcccagatgtcggggggaacgggagccgcatcgggagcagggacggcaacgggaacggcagcggtggcggtgatgcagaccccaccggaggtccaacaagcccaagccttggagatggtgtcgcggggaccggacctaataagcaaatcgaacctcccgcagccgaccgttacgcctccgccaccctcggtcctcacggcgacacccaacggaagcaacagcaacagcctcaccctgcgactgccgctcaagaagaacaatcactgctacaccaacagcggcttcaacagcagcactcccagccccagcagcggcttggggatcgggatcagcagcagctccatttaccggcccggagttggctcactggggagcggctccgcctcgatccgtcgcataacaatggtgggggacgacataatactggaggaagaggagctgccgcccacgcctccggcgacttctgcgccgacaacgccggcacctcccccaccctcatccccactgcatccgctgtccacggactcatcaacaacaacaatcagcggcggagcagtggtagcggggagcagtgcaccaaagccggcgacgccaacgccccacatctacatgaatgtcgacagcccgaagagaaaccaatactacatggatcgtaa

SEQ ID NO: 6 - protein, 633 aa, Drosophila melanogaster
MSDETTISLEDGYPPLEALTTMVPPADATGFSQSLLTFAAVMTFLIMIVGICGNLLTVVALLKCPKVRNVAAAFIISLCIADLLFCALVLPFQGLRFVQGTWRHGQVLCRLIPFIQYGNIGVSLLCIAMITINRYVMITHHGLYARIYKRHWIAVMIAACWLFSYGMQLPTLLGEWGRFGYDSRLQTCSIMTDDHGHSSKTTLFITAFVIPCLVIIACYAKIFWVVHKSEQRLKRHATKQNSIPNNLRPLASTGSGALPSGAECQPSNRVSSDSSSSFSIDVPETAPSGKQQPTRVNDQREVRAKRNEWRITKMVLAIFLSFVVCYLPITIVKVADKNVEHPSLHICSYILLYLSACINPIIYVIMNKQYRKAYKTVVFCQPARLLLPFGKTNGASSAAEMERYRVEQQPQPHNRLPDVGGNGSRIGSRDGNGNGSGGGDADPTGGPTSPSLGDGVAGTGPNKQIEPPAADRYASATLGPHGDTQRKQQQQPHPATAAQEEQSLLHQQRLQQQHSQPQQRLGDRDQQQLHLPARSWLTGERLRLDPSHNNGGGRHNTGGRGAAAHASGDFCADNAGTSPTLIPTASAVHGLINNNNQRRSSGSGEQCTKAGDANAPHLHECRQPEEKPILHGS

SEQ ID NO: 7 - DNA, 1308 bp, Drosophila melanogaster
  CDS (1)..(1308)
atggacaactatacggacgtactgtaccagtaccgcttggcaccgtccgccagcccggaaatggaaatggaactggccgatccgcgtcagatggtccgcggatttcatctgccaaccaacgagtcgcagttggagattcccgactatggcaacgagagcctggactatcccaactaccagcagatggtcggcggaccgtgtcgcatggaggacaacaatatcagctattggaatctcacctgcgattcgccactggagtacgctatgccgctctatggctactgtatgcccttcctgctgatcatcaccattatctcgaactccctgattgtgctcgttttgagcaagaagagcatggccacgcccaccaattttgtgctaatgggaatggctatatgcgatatgctgacggttatatttccggcacccggtctctggtatatgtacacattcggcaatcattataagcccctgcatccggtctccatgtgtctggcctacagcattttcaatgagataatgccagccatgtgccacaccatctccgtttggctaactctggcccttgccgttcaaagatacatctacgtttgccacgcccccatggcccgaacgtggtgcacgatgccgcgtgtgaggcggtgcacggcgtatattgcattgctggcgtttctgcaccaactgcccagattcttcgacaggacgtacatgccgctggtgatcgagtggaacggcagcccaacggaggtgtgccacttggagacgtcgatgtgggtgcacgattacattggagtggacctatactacacaagctactatctgttccgggtgctgttcgtccacctgctgccctgcattatcctggttaccctgaacattctgctgttcgcggcgatgcggcaggcacaggagcgccgaaagctcctcttccgggagaaccggaagaaggagtgcaagaaactgagggagaccaattgcaccacgctgatgctaattgtggtcgtgtcggtgttccttctagccgagatacccattgctgtggtcactgcgatgcacatcgtcagtagcctgattatcgagttcctggactatggactggccaacatttgcatcatgctgacgaacttcttcctggtattcagctatccgatcaacttcggcatctactgcggcatgtcgcgccagtttcgggagacctttaaggagatattccttggtcgactgatggccaaaaaggatagctccacaaaatactcgatcgttaatggcgcccgcacctgcaccaacaccaacgagacggtcctctag

SEQ ID NO: 8 - protein, 435 aa, Drosophila melanogaster
MDNYTDVLYQYRLAPSASPEMEMELADPRQMVRGFHLPTNESQLEIPDYGNESLDYPNYQQMVGGPCRMEDNNISYWNLTCDSPLEYAMPLYGYCMPFLLIITIISNSLIVLVLSKKSMATPTNFVLMGMAICDMLTVIFPAPGLWYMYTFGNHYKPLHPVSMCLAYSIFNEIMPAMCHTISVWLTLALAVQRYIYVCHAPMARTWCTMPRVRRCTAYIALLAFLHQLPRFFDRTYMPLVIEWNGSPTEVCHLETSMWVHDYIGVDLYYTSYYLFRVLFVHLLPCIILVTLNILLFAAMRQAQERRKLLFRENRKKECKKLRETNCTTLMLIVVVSVFLLAEIPIAVVTAMHIVSSLIIEFLDYGLANICIMLTNFFLVFSYPINFGIYCGMSRQFRETFKEIFLGRLMAKKDSSTKYSIVNGARTCTNTNETVL

SEQ ID NO: 9 - DNA, 1116 bp, Drosophila melanogaster
  CDS (1)..(1116)
atggcatttaccagcagctcatcgcccgcttgggattatcgaagctccccggaagcgttgggtgtcgtcccgttcctgtggcaacgccagaatgccacggaaacgccaacggaaataaccctccaggcgaccagcttcggtgccggccatctgctgtggctagccatcaatgccttcttgttcgtcctcatcctgggcggcaatattctgaccattgtggcggtgcgcacctgccgccacctgcgatcggtcatctccaatctgttcatcctgtcgctggccgtctccgacttctgtgtgggactggcactgccctatcatctggtattttacatgggctcggacattggcgccatgagaggtccctgcctgctgcgcttcttcctgctcatctgcgcctgctgcgtgtccatgctgaccctgatctcgattgcggttgatcggtatatagcagtcgtctatgccctgcactatagaagatacatgacccgtcgagtggcatatagcatcatcatattcaattggtgcttgggtgcattggtggctctgctgccagtgttctggaatcgatggccggatgcacaggcgtgcgaattcgacgaagttctcgcgcctggttacatcgccggagtgataacgccgggttttgtgatcatctggatctgtatgttcctcgtctactggcgcatcatgcgcgaggcatccaagcaggcgctgcgattgcgacagtcggtggtctacaacacggacgaagccaccaccatgcgaaatctgctgctccatccagactggaagagcgtccagattgtggtcttcatcatgggctgctttacgctctgttggctaccgtacttctgtgtggccattgcccagctatttagcatctgccagagcagctcgatgatctacaagacgacgttctctctggccattgccaactctgctctcaatccgattatctactcgtggaagaactccggctttcggcgagcctttgcccaaacattatgctgccgaacggcgaggcagtgcgaggatcaattgccggcggacagcaagcaccgcatggaggccacatcctcatctcaggagatcaaaccgaaggccactcagtga

SEQ ID NO: 10 - protein, 371 aa, Drosophila melanogaster
MAFTSSSSPAWDYRSSPEALGVVPFLWQRQNATETPTEITLQATSFGAGHLLWLAINAFLFVLILGGNILTIVAVRTCRHLRSVISNLFILSLAVSDFCVGLALPYHLVFYMGSDIGAMRGPCLLRFFLLICACCVSMLTLISIAVDRYIAVVYALHYRRYMTRRVAYSIIIFNWCLGALVALLPVFWNRWPDAQACEFDEVLAPGYIAGVITPGFVIIWICMFLVYWRIMREASKQALRLRQSVVYNTDEATTMRNLLLHPDWKSVQIVVFIMGCFTLCWLPYFCVAIAQLFSICQSSSMIYKTTFSLAIANSALNPIIYSWKNSGFRRAFAQTLCCRTARQCEDQLPADSKHRMEATSSSQEIKPKATQ

SEQ ID NO: 11 - DNA, 2430 bp, Drosophila melanogaster
  CDS (1)..(2430)
atgtcaatagcgatcatgcctcacctgcctatcacatttactctcgccatcctgctcgcaattgcttctaatgaaggcgcgcaaggcgtagaaagtgcgacaaggacggcaattgaagctatacgaacaggaatcggcacgaaaccggaaacggaaattgcggacgccacagaggcggaagcccccgtgcgagaggtaatatcgctgctgggcataatcgatggtgctgagtccgatatcctggttcccgacgccgccgacaagtgtcctggcggctatttccactgcaatacaacggcacagtgtgctccacagcgggccaactgtgacggcagtgtcgactgcgatgacgcatcggatgaggtgaactgcgtgaacgaggtggacgccaagtactgggatcacctgtacaggaagcagccattcgggagacacgataatcttaggattggcgaatgcctttggcccaacgaaaacttttcctgtccctgtcgaggtgatgaaattctatgccgatttcagcagctaaccgatattccagaacgactgccgcagcacgatctggcaacgctcgatctaacgggaaacaatttcgaaaccatccacgaaactttcttcagtgaactgccagacgtcgatagcttagtgctgaagttctgctcaatccgtgagattgcctcgcatgcattcgatcgcctggcggacaacccactgaggaccctttatatggacgataataaattaccgcatctgccggaacacttcttccccgagggcaatcaattgagtattctcattttggcacgcaaccacctgcaccatttgaaacgaagcgattttctcaatctacagaagttacaggaactggaccttcgcggcaatcgcataggaaacttcgaagccgaggtctttgcccgactaccgaatttggaggtgctctatctcaacgaaaaccacttaaagcgtctggatccagatagatttcccagaaccctgctcaatctgcacactttgtccttggcttacaatcagatcgaggacatcgccgcgaatacattcccctttccacgccttcgatacttatttctggctggcaatcgattatcccacatacgagatgaaacattttgcaatctcagcaatctacaaggattgcacttgaacgagaaccggatcgaaggcttcgacctggaggccttcgcctgtttgaagaacctaagctctctgctcctaacgggcaatcgcttccagaccctcgattcgcgagttctaaaaaacctaagcagcctggattatatttacttctcgtggttccatttgtgtagcgccgccatgaatgtccgggtctgtgatccacacggcgatggcatcagcagcaagttgcacctgctggacaatcagatattgcgaggcagtgtctgggtgatggcctcgattgccgtggttggcaacctattggtcctgctcggtcgctacttctacaaatcacggagcaacgtggagcactcgctctaccttcgccatttggccgccagtgatttcctcatgggcatttacctcacattgattgcctgtgcggatatcagttttcgcggcgagtatatcaaatacgaggagacctggcggcatagcggcgtttgtgccttcgcaggcttcctcagcaccttcagctgccagtcgtcgacgctgctgctcacattggtcacctgggatcgtctgatgtcggtgacgaggcccctcaagccacgggatacggaaaaagttcgcattgtcctacgccttctgctgttgtggggcataagtttcggattagctgcagctccacttcttcccaatccgtactttggtagccatttctacggcaacaatggtgtctgcttatcgctgcatatccacgatccctatgcgaagggttgggagtactcggcgctgctgttcatcctggtcaatacgttgtcactgatcttcatcctcttttcctacattcgaatgttgcaagcgataagggattcgggtggcggaatgcgaagcactcacagcggtcgcgagaatgtggtagcaactcgctttgccatcattgtgaccaccgattgcgcctgctggctgcccataattgtggtcaaattggctgctctttcaggctgcgaaatctcgcccgatctttacgcctggctggcggttcttgtgctgccagtgaactcggccctcaatccagtgctctacacattgaccactgcggcctttaagcaacagctgcgtcgctactgtcacaccctgcccagctgctcgctggtgaacaacgagacccgatcccagacccagactgcctacgagtccggactgagtgtcagtctggcgcacttgggcggtggtgtgggcggcgggtcggggcgaaagcggatgtcacaccggcagatgagctatctgtag

SEQ ID NO: 12 - protein, 809 aa, Drosophila melanogaster
MSIAIMPHLPITFTLAILLAIASNEGAQGVESATRTAIEAIRTGIGTKPETEIADATEAEAPVREVISLLGIIDGAESDILVPDAADKCPGGYFHCNTTAQCAPQRANCDGSVDCDDASDEVNCVNEVDAKYWDHLYRKQPFGRHDNLRIGECLWPNENFSCPCRGDEILCRFQQLTDIPERLPQHDLATLDLTGNNFETIHETFFSELPDVDSLVLKFCSIREIASHAFDRLADNPLRTLYMDDNKLPHLPEHFFPEGNQLSILILARNHLHHLKRSDFLNLQKLQELDLRGNRIGNFEAEVFARLPNLEVLYLNENHLKRLDPDRFPRTLLNLHTLSLAYNQIEDIAANTFPFPRLRYLFLAGNRLSHIRDETFCNLSNLQGLHLNENRIEGFDLEAFACLKNLSSLLLTGNRFQTLDSRVLKNLSSLDYIYFSWFHLCSAAMNVRVCDPHGDGISSKLHLLDNQILRGSVWVMASIAVVGNLLVLLGRYFYKSRSNVEHSLYLRHLAASDFLMGIYLTLIACADISFRGEYIKYEETWRHSGVCAFAGFLSTFSCQSSTLLLTLVTWDRLMSVTRPLKPRDTEKVRIVLRLLLLWGISFGLAAAPLLPNPYFGSHFYGNNGVCLSLHIHDPYAKGWEYSALLFILVNTLSLIFILFSYIRMLQAIRDSGGGMRSTHSGRENVVATRFAIIVTTDCACWLPIIVVKLAALSGCEISPDLYAWLAVLVLPVNSALNPVLYTLTTAAFKQQLRRYCHTLPSCSLVNNETRSQTQTAYESGLSVSLAHLGGGVGGGSGRKRMSHRQMSYL

SEQ ID NO: 13 - DNA, 2031 bp, Drosophila melanogaster
  CDS (1)..(2031)
atggacaggagtcggagtagcagagctgccagcagcaaccagttcatcaggccatgtggcctactgacgaccgtcatcctgctgcagacgcttgtgtcgatgagtttggccatcgaggagatgtcgccaccaccggccgccccgccacgtccatcgccgccgcccaccgtgaagctcaacaagtgctgccattcgggcgagtatctgaacgatggcacctgcatcgccggcagcgaagccctgtggctgcccatggtgtacttggtgcagcagcagcgcttcttcgagccccatggcgccagtccgcgattcttgaagttcctgcccaatacgagacccacgtgccgaaaggaccagacgacggagatctttcgcagccgcggagccaatgtgatgctctttcccaatggcacgctctatgtgcgggaacgcgctctaatggtccagccgtcggattactgtgtcgactgggaggtggccgtcgtttgcttgaacgacagtcagccgatcaatgctctggaggatcccgattatgcagccaatcctctcgtgcagcaggagccgcccaaggctagcctgcgactgagcaagtgctgcggcaagtggggcagctataacacgcagctccagaactgcgatctgcagcccaaccatcaggcagccgtcgatggactgctgcgattgtcgccgcagctaccggagggcagctatcagactagctacggcctgcccgactgtggccaacccggtggctactccattgccggtgattggcaggatgccaagctggatcggaacacggccatgctccagttgccgcacaagaacctcagcgccggacaatactgcctggagcacacacagcgcgagggcgaggtgaagatcatagcctgccagcatttgtttagctccgcggcaggagccggcatccacgacggctccattggaggcaccatcgagcaggccaatggccagaatctacagaaggccgtcctgactggtggcatacttgtgtccattgtcttcctgtccgccactttggtggccggcttcctgctgcccgctgtgcatcatgcgcttcattggcgctgccaaatctgctatgtcacctgcctgctattcggcaaaatactgctggccatcgaggagctgagctccagcctgcagccgggcagtgccgcctgccatacgcttgctatcaccatgcagttcttctttctggccgccttcttttggctgaacaccatgtgcttcaacatctggtggacgttccgggactttcggcccagttcgttggaacgcaatcaggaggcactgcgtcgctatctgtactccctgtacgcttggggcggtcctctgcttatcaccttcgtggccgcctgcgtggaccagctgccggagacgacgctactgcgtccgggattcggacagctctactgctggttcgacaatcgcaatctctcgatcttcgcctacttctacggacccattggcctgctgctgtgcgccaatatagcgctcttcgtgtccaccacccatcagttgacgtgcggcctgtggaaacgggacgatgtcaagtcctcatcggagaagtccgccctgggacgcgtctgcctgaagctagtcgtcgttatgggtgtcacctggatagcggacattctgtcctggctagtgggtggaccgcatggcgtatggttcttcaccgacctgatcaacgccctgcaaggcgtcttcatcttcatcgtggtgggctgccagccgcaggtgtggaccgcctgccgcaggatcttctgtccgcgattgcgtcatgacatcaccaatacgaccaacggtgtccagcactcgagcagctcgcagggtttgccctcgatggccggcggcacggagattacacagaacaccaccaccaccaccacgacagccaacacgaccgccactcacatgcccagcaatccggcggaggatgaggtaccggagaaggctcccattgcccccgtcgcacccatcgtcaaaatggagaccatttgctaa

SEQ ID NO: 14 - protein, 676 aa, Drosophila melanogaster
MDRSRSSRAASSNQFIRPCGLLTTVILLQTLVSMSLAIEEMSPPPAAPPRPSPPPTVKLNKCCHSGEYLNDGTCIAGSEALWLPMVYLVQQQRFFEPHGASPRFLKFLPNTRPTCRKDQTTEIFRSRGANVMLFPNGTLYVRERALMVQPSDYCVDWEVAVVCLNDSQPINALEDPDYAANPLVQQEPPKASLRLSKCCGKWGSYNTQLQNCDLQPNHQAAVDGLLRLSPQLPEGSYQTSYGLPDCGQPGGYSIAGDWQDAKLDRNTAMLQLPHKNLSAGQYCLEHTQREGEVKIIACQHLFSSAAGAGIHDGSIGGTIEQANGQNLQKAVLTGGILVSIVFLSATLVAGFLLPAVHHALHWRCQICYVTCLLFGKILLAIEELSSSLQPGSAACHTLAITMQFFFLAAFFWLNTMCFNIWWTFRDFRPSSLERNQEALRRYLYSLYAWGGPLLITFVAACVDQLPETTLLRPGFGQLYCWFDNRNLSIFAYFYGPIGLLLCANIALFVSTTHQLTCGLWKRDDVKSSSEKSALGRVCLKLVVVMGVTWIADILSWLVGGPHGVWFFTDLINALQGVFIFIVVGCQPQVWTACRRIFCPRLRHDITNTTNGVQHSSSSQGLPSMAGGTEITQNTTTTTTTANTTATHMPSNPAEDEVPEKAPIAPVAPIVKMETIC

SEQ ID NO: 15 - DNA, 1755 bp, Drosophila melanogaster
  CDS (1)..(1755)
atgttcaactacgaggagggggatgccgaccaggcggccatggctgcagcggctgcctatagggcactgctcgactactatgccaatgcgccaagtgcggcgggtcacatagtgtcgctcaacgtggcaccctacaatggaactggaaacggaggcactgtctccttggcgggcaatgcgacaagcagctatggcgatgatgatagggatggctatatggacaccgagcccagtgacctggtcaccgaactggccttctccctgggcaccagttcaagtccaagtcccagttccacacccgcttccagctccagtacttccactggcatgcccgtctggctgatacccagctatagcatgattctgctgttcgccgtgctgggcaacctgctggtcatctcgacgctggtgcagaatcgccggatgcgtaccataaccaacgtgttcctgctcaacctggccatatcggacatgctgctgggcgtgctctgcatgcccgtcaccctggtgggcaccctgctgcgaaacttcatctttggcgagttcctctgcaagctctttcagttctcgcaagccgcctccgtggccgtttcgtcctggaccttggtggccatatcctgtgagcgctactacgcgatatgccatccactgcgctcgcgatcctggcagacaatcagtcacgcctacaagatcatcggcttcatctggctgggcggcatcctctgcatgacgcccatagcggtctttagtcaattgatacccaccagtcgaccgggctactgcaagtgccgtgagttttggcccgaccagggatacgagctcttctacaacatcctgctggacttcctgctgctcgtcctgccgcttctcgtcctctgcgtggcctacatcctcatcacgcgtaccctgtacgtaggcatggccaaggacagcggacgcatcctgcagcaatcgctgcctgtttccgctacaacggccggcggaagcgcaccgaatccgggcaccagcagcagtagtaactgcatcctggtcctgaccgccaccgcagtctataatgaaaatagtaacaataataatggaaattcagagggatccgcaggcggaggatcaaccaatatggcaacgaccaccttgacaacgagaccaacggctccaactgtgatcaccaccaccacgacgaccacggtgacgctggccaagacctcctcgcccagcattcgcgtccacgatgcggcacttcgcaggtccaacgaggccaagaccctggagagcaagaagcgtgtggtcaagatgctgttcgtcctggtgctggagtttttcatctgctggactccgctgtacgtgatcaacacgatggtcatgctgatcggaccggtggtgtacgagtatgtcgactacacggccatcagtttcctccagctgctggcctactcatccagctgctgcaatccgatcacctactgcttcatgaacgccagcttccggcgcgcctttgtcgacaccttcaagggtctgccctggcgtcgtggagcaggtgccagcggaggcgtcggtggtgctgctggtggaggactctccgccagccaggcgggcgcaggcccgggcgcctatgcgagtgccaacaccaacattagtctcaatcccggcctagccatgggtatgggcacctggcggagtcgctcacgccacgagtttctcaatgcggtggtgaccaccaatagtgccgccgccgccgtcaacagtcctcagctctaa

SEQ ID NO: 16 - protein, 584 aa, Drosophila melanogaster
MFNYEEGDADQAAMAAAAAYRALLDYYANAPSAAGHIVSLNVAPYNGTGNGGTVSLAGNATSSYGDDDRDGYMDTEPSDLVTELAFSLGTSSSPSPSSTPASSSSTSTGMPVWLIPSYSMILLFAVLGNLLVISTLVQNRRMRTITNVFLLNLAISDMLLGVLCMPVTLVGTLLRNFIFGEFLCKLFQFSQAASVAVSSWTLVAISCERYYAICHPLRSRSWQTISHAYKIIGFIWLGGILCMTPIAVFSQLIPTSRPGYCKCREFWPDQGYELFYNILLDFLLLVLPLLVLCVAYILITRTLYVGMAKDSGRILQQSLPVSATTAGGSAPNPGTSSSSNCILVLTATAVYNENSNNNNGNSEGSAGGGSTNMATTTLTTRPTAPTVITTTTTTTVTLAKTSSPSIRVHDAALRRSNEAKTLESKKRVVKMLFVLVLEFFICWTPLYVINTMVMLIGPVVYEYVDYTAISFLQLLAYSSSCCNPITYCFMNASFRRAFVDTFKGLPWRRGAGASGGVGGAAGGGLSASQAGAGPGAYASANTNISLNPGLAMGMGTWRSRSRHEFLNAVVTTNSAAAAVNSPQL

SEQ ID NO: 17 - DNA, 2010 bp, Drosophila melanogaster
  CDS (1)..(2010)
atgattatgacgatgatgcagacggtaagggcatggcaacaggaatcggatgtggagcaccgaaaacaacataagcagcgatggcgacctgatggggcacacatatcagcggcttacgacctcaacagtgataatgacgacggccaccacagggtggtgcataatcaaaacaacggcagcccaaacagctctccgaatcagagcacttccgccttccgacagcggcaaccgcaccacccacccaccggacaacaaccgccccggctgccctgcaccgtaacccacttctccgcacactggaaaacgctgctcatcctgctcaccctgctctccgcttccacgctgacagcctccgccaatgtcaccagcaccatcagtccgcccatcaacggcagcagcaccgattacatcctgctctatggcgaatccaccacatcccttgtgcccgccctgaccaccggactctcgggggacggaagtggtgcggttatcgaggacgaggaggatgccgagaaggccagcgagtacatctttgatcgcaccgatgtgcgcataatattcatcacactctacacactggtgttttgctgctgtttctttggtaacctccttgttattttggtggtcacattatcacgacgactgcgctcaataaccaactttttcctcgccaacttggcgtttgccgacttctgtgttggactcttttgtgtgatgcagaatctgtccatctatctgatagaaagctgggtctttggcgagttcctctgccgcatgtaccagtttgtccactccctgagctacacggcctccattttcatcctggttgtcatctgtatggagcgctactttgccatcgtacaccccattacctgcaaacagatcctaactgcggctcgtctgaggatggtcattgtcacagtttggattacatcggcagtttactccacgcccaagtttgttttcagcaagaccattaagaacatccacacgcaggacgggcaggaggaggagatatgtgtcctggaccgtgagatgttcaactccaagttgctggacatgattaactttgtgcttctctacgttatgccgctcttggtgatgacggtgctgtacagcaaaatcgccatcgccttgtggcgcagttcgcgcggcctcacgccgcatgtggtgcagcatcagcatcagcagccgcagcagccatcctgccaggacattggcatgggtatgcacaacagcatgtaccatcaccatccgcatcatcatcaccaccaccaccagcatcaccagctgcaatcggcggcttcgtcggcaggagtggtgggagtgggtttgggtggtggtggtgggggcggtcctggtccgtcactcgcttccggcggcagcagcaccacgtccttgtcccgcaaacagagcagtaaatatgagaagcgcggcgtcagcatcacggagagccagctcgataattgcaaggtgtccctggaggccgatcgtcccattgtcagtgcctgccgcaagacgagcttctaccaccacggccacgcccatcaccagcgggcgggcaacgcctcagtgggcggtggcagcggcggagccggggccggagccacccacatgtcccactcgtccagcaacgtcctacgcgcccggcgcggcgttgtccgcatgctgataatattcgtgctgacattcgccctctgcaatctgccgtatcatgcccgcaaaatgtggcagtactggtcacgttcgtatcgcggtgattccaattttaatgcgctgctaacaccgctcacctttctggtcacgtacttcaattcgggcgtaaatcccctactctacgccttcctcagtcgcaattttcggaagggcatgaaggagctgctcctctgctcctggaagaagggcaagggcaagtcctcctcgaactcctcgatgcaccacaagcgcaaggcgctgcagacccactcgctgcccacggacaccacccacattgggaacgagcagctatga

SEQ ID NO: 18 - protein, 669 aa, Drosophila melanogaster
MIMTMMQTVRAWQQESDVEHRKQHKQRWRPDGAHISAAYDLNSDNDDGHHRVVHNQNNGSPNSSPNQSTSAFRQRQPHHPPTGQQPPRLPCTVTHFSAHWKTLLILLTLLSASTLTASANVTSTISPPINGSSTDYILLYGESTTSLVPALTTGLSGDGSGAVIEDEEDAEKASEYIFDRTDVRIIFITLYTLVFCCCFFGNLLVILVVTLSRRLRSITNFFLANLAFADFCVGLFCVMQNLSIYLIESWVFGEFLCRMYQFVHSLSYTASIFILVVICMERYFAIVHPITCKQILTAARLRMVIVTVWITSAVYSTPKFVFSKTIKNIHTQDGQEEEICVLDREMFNSKLLDMINFVLLYVMPLLVMTVLYSKIAIALWRSSRGLTPHVVQHQHQQPQQPSCQDIGMGMHNSMYHHHPHHHHHHHQHHQLQSAASSAGVVGVGLGGGGGGGPGPSLASGGSSTTSLSRKQSSKYEKRGVSITESQLDNCKVSLEADRPIVSACRKTSFYHHGHAHHQRAGNASVGGGSGGAGAGATHMSHSSSNVLRARRGVVRMLIIFVLTFALCNLPYHARKMWQYWSRSYRGDSNFNALLTPLTFLVTYFNSGVNPLLYAFLSRNFRKGMKELLLCSWKKGKGKSSSNSSMHHKRKALQTHSLPTDTTHIGNEQL

SEQ ID NO: 19 - DNA, 1638 bp, Drosophila melanogaster
  CDS (1)..(1638)
atgaacagggacaatctgcagcagtggtgggagaactcgtatcggcgccaacatccagagcccaccgatgacctcggcctggactccgcggagctgcatctcgccctccaggagcccaaccagctgcccgcggactacgactatggcaactttagtctaggcaatccgtatgacgtggactcagagcactccatttccccgctgacgctgctcctgctcgctgttagctatggcctggtggttttcggcggcgtcgtgggcaactccacgctcgttctgaccctctgctccgcctcttcggtgcgtttgcgtaacccgctgctgctggccgtctgcattgccgatctcctggtcaccggcatctccgctccggtcacgctcctcaatctcgcgatgaaccggaggacgcgatcgctgccccttgtgctgtgcaaggtcatacactacgtacaggtcatgcccgtttcggccagcactatttcgtttttcatgctctcccttgaccgctacgccacagtaaagcatccgcgattggcgcagcttcgccagcggcgctacttgcacgtctccctggcgctgctatcctggctcgcctctgccgccatcagcactccctttctgtttgcctacaaaatcatcgccaagtcgatggtggtcaagggcggtggggcggcgaacaccacgccaaacccggtcagcatcagctgcacctccgacctgggcgccaacgccatgttcatgtccttcatcatcttccacaccatcgccgtgttcgtgttgcctggcattggtgtgctactcaaccactacggcgtccgacgcaagctctgcgccctgtcgctaacggctcgagctgcccatggagagctgccgctgcccattcccatcctgcgacgccagacccacatggtcattgtgacgggctgccccaacgcccagcaagcggcctgtggtgggggcaccacggcggacgacacctcgaacgggaacggcacgggcaccggtggcggtcccatggccgtcagtccgggcgacatacagcttcacacactgcagccgcgccagccaggctctgccggatcggccctcgagccgggctcctaccgctctagcaatcccatatcgcccagggccatgagggagattcgcgcccactcgcagcgccagcgcatcaaccgagcaggcaggggaccagcgacacccggcatcccactgccccaaacctccacgctgcggtcgcgaaggcacctggccaacatgctcatcgcctcggcagtgatcttcattgcctgctgggcaccgcacgtcttctgcatcttctacaagaacttcggcaacaatcagcagtgcagccagacctctgtttacttcagccttctgctaggctacttctactcggctatcagtccggtgatctactgggcgctcaaccacaattcgcttcgacaatctccctgcgcgcccatcatccgcctgcgctccatgcagaacttcctgaggtcgcgcttccggacgcacaccgccccgccgcctccctcgtccaccaacgaggcggcactgggggcattcaaccccaagctgatcaagctgacaccgaaacagtatagagctcaggcctcttcgcattatctctactag

SEQ ID NO: 20 - protein, 545 aa, Drosophila melanogaster
MNRDNLQQWWENSYRRQHPEPTDDLGLDSAELHLALQEPNQLPADYDYGNFSLGNPYDVDSEHSISPLTLLLLAVSYGLVVFGGVVGNSTLVLTLCSASSVRLRNPLLLAVCIADLLVTGISAPVTLLNLAMNRRTRSLPLVLCKVIHYVQVMPVSASTISFFMLSLDRYATVKHPRLAQLRQRRYLHVSLALLSWLASAAISTPFLFAYKIIAKSMVVKGGGAANTTPNPVSISCTSDLGANAMFMSFIIFHTIAVFVLPGIGVLLNHYGVRRKLCALSLTARAAHGELPLPIPILRRQTHMVIVTGCPNAQQAACGGGTTADDTSNGNGTGTGGGPMAVSPGDIQLHTLQPRQPGSAGSALEPGSYRSSNPISPRAMREIRAHSQRQRINRAGRGPATPGIPLPQTSTLRSRRHLANMLIASAVIFIACWAPHVFCIFYKNFGNNQQCSQTSVYFSLLLGYFYSAISPVIYWALNHNSLRQSPCAPIIRLRSMQNFLRSRFRTHTAPPPPSSTNEAALGAFNPKLIKLTPKQYRAQASSHYLY

SEQ ID NO: 21 - DNA, 1332 bp, Drosophila melanogaster
  CDS (1)..(1332)
atggcaaaagtagctgaggagaatgatcatcgtgatctaagtaattggtcgaatgtgaacgacaccaatggcaccattcacctgaccaaggatatggtcttcaatgatggccaccgattgtccatcaccgtgtacagcatactgtttgtgatctcaacaattggcaacagcaccgtgctgtatctgctgaccaagcggcgactgcgcggtcccttgcgtattgatatcatgctaatgcatctggccatcgccgatctaatggtgacgctgctcctgatgccaatggagatcgtgtgggcctggacggtgcaatggctatccacggacctgatgtgccgcctgatgagctttttccgcgtctttggcctgtatctgtccagctacgtgatggtctgcatatcgctcgacagatactttgccatactgaagccgctcaagcggtcctacaaccggggacgcatcatgctggcctgcgcctggctgggatcagtcgtctgcagcattccacaggcctttctctttcatctagaggagcatcccgccgtcaccggctactttcaatgcgtcatcttcaactcgttcaggagtgactttgatgagaagctgtatcaggcggcctccatgtgcagcatgtacgcctttccgctgatcatgttcatctactgctacggagccatttacctggagatctatcggaagagccagcgcgtcctcaaggacgtgatcgccgagcgattccggcgttccaacgacgacgtgctcagccgggccaagaagcgcacgctcaaaatgaccatcacgattgtgattgtgttcatcatctgctggactccgtactacaccatctccatgtggtactggctggacaagcactccgcgggcaagatcaacccactgctgcgcaaggcgctgttcatcttcgcctcgacaaactcatgtatgaatccattggtctacggactctacaacattcgcgggcgaatgaacaacaacaatccgtcggtcaacaacaggcacacctcgctgtccaatcggctggactcctccaatcagctgatgcaaaagcagttgaccaacaactcgctgctgaatggaagaggccaggtgatggcagccgctgtttcggccaccacaaagttggccaatgtggtcagccttaaaggcactgccaatggcaatggctcagctgcagccgcgggaacagttccaataactcctccgctgacagtaaccatcgctccgctggccaccgacgacgaggccaacgatgattcctgtcttagtgcggtcaccatcaggtgccaggatcaatccccgatccgccagaagtaa

SEQ ID NO: 22 - protein, 443 aa, Drosophila melanogaster
MAKVAEENDHRDLSNWSNVNDTNGTIHLTKDMVFNDGHRLSITVYSILFVISTIGNSTVLYLLTKRRLRGPLRIDIMLMHLAIADLMVTLLLMPMEIVWAWTVQWLSTDLMCRLMSFFRVFGLYLSSYVMVCISLDRYFAILKPLKRSYNRGRIMLACAWLGSVVCSIPQAFLFHLEEHPAVTGYFQCVIFNSFRSDFDEKLYQAASMCSMYAFPLIMFIYCYGAIYLEIYRKSQRVLKDVIAERFRRSNDDVLSRAKKRTLKMTITIVIVFIICWTPYYTISMWYWLDKHSAGKINPLLRKALFIFASTNSCMNPLVYGLYNIRGRMNNNNPSVNNRHTSLSNRLDSSNQLMQKQLTNNSLLNGRGQVMAAAVSATTKLANVVSLKGTANGNGSAAAAGTVPITPPLTVTIAPLATDDEANDDSCLSAVTIRCQDQSPIRQK

SEQ ID NO: 23 - DNA, 1434 bp, Drosophila melanogaster
  CDS (1)..(1434)
atgtacgcctccttgatggacgttggccagacgttggcagccaggctggcggatagcgacggcaacggggccaatgacagcggactcctggcaaccggacaaggtctggagcaggagcaggagggtctggcactggatatgggccacaatgccagcgccgacggcggaatagtaccgtatgtgcccgtgctggaccgcccggagacgtacattgtcaccgtgctgtacacgctcatcttcattgtgggagttttgggcaacggcacgctggtcatcatcttctttcgccaccgctccatgcgcaacatacccaacacatacattctttcactggccctggctgatctgttggttatattggtgtgtgtacctgtggccacgattgtctacacgcaggaaagctggccctttgagcggaacatgtgccgcatcagcgagttctttaaggacatatccatcggggtgtccgtgtttacactgaccgccctttccggcgagcggtactgcgccattgtaaatcccctacgcaagcttcagaccaagccgctcactgtctttactgcggtgatgatctggatcctggccatcctactgggcatgccttcggttcttttctccgacatcaagtcctaccctgtgttcacagccaccggtaacatgaccattgaagtgtgctccccatttcgcgacccggagtatgcaaagttcatggtggcgggcaaggcactggtgtactacctgttgccgctgtccatcattggggcgctatacatcatgatggccaagcggctccatatgagcgcccgcaacatgcccggcgaacagcagagcatgcagagccgcacccaggctagggcccgactccatgtggcgcgcatggtggtagcattcgtggtggtgttcttcatctgcttcttcccgtaccacgtgtttgagctgtggtaccacttctacccaacggctgaggaggacttcgatgagttctggaacgtgctgcgcatcgttggattttgcacgagcttcctaaactcgtgcgtcaaccccgtggccctctactgcgtgtccggggtgtttcggcagcactttaatcgctacctctgctgcatctgcgtcaagcggcagccgcacctgcggcagcactcaacggccactggaatgatggacaataccagtgtgatgtccatgcgccgctccacgtacgtgggtggaaccgctggcaatctgcgggcctcgctgcaccggaacagcaatcacggagttggtggagctggaggtggagtaggaggaggagtagggtcaggtcgtgtgggcagctttcatcggcaggactcgatgcccctgcagcacggaaatgcccacggaggtggtgcgggcgggggatcctccggacttggagccggcgggcggacggcggcagtgagcgaaaagaggtga

SEQ ID NO: 24 - protein, 477 aa, Drosophila melanogaster
MYASLMDVGQTLAARLADSDGNGANDSGLLATGQGLEQEQEGLALDMGHNASADGGIVPYVPVLDRPETYIVTVLYTLIFIVGVLGNGTLVIIFFRHRSMRNIPNTYILSLALADLLVILVCVPVATIVYTQESWPFERNMCRISEFFKDISIGVSVFTLTALSGERYCAIVNPLRKLQTKPLTVFTAVMIWILAILLGMPSVLFSDIKSYPVFTATGNMTIEVCSPFRDPEYAKFMVAGKALVYYLLPLSIIGALYIMMAKRLHMSARNMPGEQQSMQSRTQARARLHVARMVVAFVVVFFICFFPYHVFELWYHFYPTAEEDFDEFWNVLRIVGFCTSFLNSCVNPVALYCVSGVFRQHFNRYLCCICVKRQPHLRQHSTATGMMDNTSVMSMRRSTYVGGTAGNLRASLHRNSNHGVGGAGGGVGGGVGSGRVGSFHRQDSMPLQHGNAHGGGAGGGSSGLGAGGRTAAVSEKR

SEQ ID NO: 25 - DNA, 5508 bp, Drosophila melanogaster
  CDS (1)..(5508)
atgaaaaactccaaatgtttaccaaatgagcggcgacaaatacgcgaccaattgacgagatcgtgtgtgtttttctcaattaaacgagcatcgtccataattagcgccatcgtagccagggagccaagaagcaaccaatggaacatgttgatgccggtgcgggagtacaacaagcacatagccaaaataccaaattgcaagatgaggcagcggccaacgcttagagccaccttcgcatccctgctgctgctccttctcattgcccagacgctcgatctggcggctgccagtggatcagccggaagtggtgccgcagcggccggagctgcaggtcctgccgcgtccggtggcgcgggtggcgggagtctgagcagtggagcccccactctcattgccaatctcacggaacaaggcagtcccgtgtccaagtaccaaaccgcctacgcctgcgaaggtaagaaactgaccatcgagtgcgatcccggcgatgtgatcaacctcattcgggccaactatggccgcttctcgattaccatctgcaatgaccacgggaatgtggagtggagtgttaactgcatgtttcccaagtcactcagcgtactgaactcaagatgtgcccacaagcagagctgcggcgtgttggcagccacgagcatgttcggggatccctgtcccggtacccacaagtatctggaggcacactaccagtgcataagtgcagcccaaacttcgacgacgaccaacaggcccagtccgccgccatgggtgctgagcaatggtccgccgatctttggcaacggcagtggactgatccatccgcccggggttggagcgggtgcgccgcccccgccgagacttcccacacttcccggagtggtgggaatcagtgggaatcccggcctgttcaacgtaccaccgcaacacaccgccgtcacgcactccacgccctcgagcagcacgacagccgtgggcggtggacgtttgaagggtggggccacctccacgacgaccaccaagcatccggctggccgccatgatggtctgccaccgccgccgcaactgcaccaccaccacaaccaccacggtgaagacactgcctcacccaccaagccgagcagcaagctgccggctggcggtaatgccacttcaccatccaacacgaggatactcacgggcgtcggaggttccggaactgatgacggaaccctactgaccacaaagagctcacccaaccgcccaccgggcactgcggccagtggatccgttgtccccgggaacggcagcgtggtgcgcaccatcaacaatattaatttgaacgcagccgggatgtccggaggcgatgatgagtccaagttgttttgcggccccactcatgcccgcaatttgtactggaacatgactcgagtgggtgatgtgaatgttcagccctgtcctggcggagcagccggcatcgccaagtggcgttgcgttctaatgaagaggatacccgactccggctacgatgagtacgatgatgacatcagttcgacaactccggcacccagcggtggcgactgtctgcacaacagcagcagctgcgagccgccggtgagcatggcccacaaggtaaaccagcgtctgcgcaactttgatcccacctggcatcccgcgacacctgatctgacgcaatgccgcagcctttggctcaacaatctggaaatgcgagtaaaccagcgggactcctccttgatctccatcgccaacgatatgtccgaagtgaccagtagcaaaacgctctacggcggcgacatgttggtcaccacgaagattatccaaacagtgtccgagaagatgatgcacgacaaggagaccttcccggatcagcgacagcgcgaggctatgatcatggagttgttgcattgtgtggtcaaaaccggctccaacctgctggacgaatcgcagctgtcctcgtggttggatctcaatccggaggaccaaatgcgtgtagccacatccttgctaactggcctggaatacaatgcctttctgctggcggatacgatcatcagggagcgcagcgtggtgcaaaaagtcaaaaatatattgctctccgttcgagtgctggaaaccaagactatccagtccagcgtggtcttcccagattcggatcagtggcccttgagttcggatcgtattgagctgccacgagctgctctaatagataatagtgaaggcggtctggtgcgaattgtattcgccgccttcgatcgcctggaatccattctaaagcccagctatgatcacttcgatctcaagagctcccgcagttacgttcgcaatacagccatcctgagcaacgacagcgatgtcaacgcgggggagatccaacagcgcctacgcatcctgaacagcaaggtgatctcggccagcttgggcaaggggcgtcacatacaactctcccagcccataaccctgacactgaaacatctgaagaccgagaatgtaacgaatcccacctgcgtgttctggaactatattgaccatgcgtggtctgccaacggatgcagtctggagtccactaaccgcacgcacagcgtctgcagttgcaaccacctgacaaactttgccatactaatggacgttgtggatgagcaccagcattcgttgttcaccatgttcgatggaaacatgcgcatattcatctacataagcatcggcatctgcgtggtcttcatagttatcgccctgctaacgctgaagctgttcaatggggtctttgtgaagtccgcgcgcacctcgatctataccagcatttacctttgcctcctggccatcgagctgctctttctcctgggcattgaacagaccgaaacaagcattttctgcggcttcattactattttcctacactgtgccatcctatcgggcaccgcctggttctgttacgaagccttccattcgtactcaacgctcacctcggacgagctcctgatggaggtggaccagacgcccaaggtgaactgctactacctcttgtcctacggactgtcgctgagtgtggtggccatctcgctggtcatcgatcccagcacctatacccaaaacgattattgcgtgctgatggaggcgaatgccttgttttatgccacctttgtaataccagtgcttgtcttctttgtggctgccattggttacacattcctctcctggattataatgtgccgcaaaagtcgcacgggtctaaagaccaaggaacatactcgcctcgctagcgtgcggttcgacatacgctgctcctttgtgttcctcttgctgctcagcgctgtttggtgctcggcctacttctatttgcgaggagccaaaatggacgatgacacggctgatgtgtatggatactgcttcatctgcttcaacacattgctggggctctatatcttcgtgttccattgcattcaaaacgaaaagatccggcgggagtatcggaagtatgtgagacagcacgcttggctgcccaagtgcttgcgctgctcgaaaacatcaatttcctcgggcattgttaccggcaatggacccacagccggaaccctttgcagcgtctccacgtccaagaagcccaagctgccgttaggagtgagcgaagaggcgcatgacgatccccagcagcaacagcagacaccagtgcccatcacagaggatgccattatgggagccacctctgattgtgaactgaacgaggcccagcaaagaagaaccctgaaaagtgggctaatgacaggcacactacaggctccaccgcagacccttggtggccatgttgtgctcgaaagaggtagcactctccgctccactggtcatgcctcacccaccagctctgccgggtccacacacctgatttttgcgcacaagcaacaacaacagcagcagcaacagggacctttgggcgagtcttactaccatcagccggactactacagctggaagcaaccatcaactggaacaggaggattgaaaacaccgcgggagtactacaataatgcgggtgctgctgcatcatcgccgcaacaggcgcacgaggtattctactggactcaaaagccgaacagcggccacaatggcaaaaagaagaggggcgccggaggagttcccgcctcgcctagtggatctctgcacagtcgcacggccgccgcctcccaggtgcttttctatccatcgtacaagaagaccaagcctggccagccaacaggctatccgcaatacgcggaggcgttggacccaccactagccactggcaatgcggctgcctactaccagcagcagcaacagttgcgtcgccagcagctacatcagcagcagcaacagcagcagcagcagcaactctcctcggacgaggagcaggccgagcaacatgctcacctgttgcacctgcaacgacgagctggtagccagcagcagctccctgctccaccgccacacatggcgcagtaccagcaggagtttatgcagcgccagtatagaaataagcattccaactgtgatctgggcatgggcgatgcctactacaaccaaggcagcgtcggcggcgcggatggtgggccggtctacgaggagatcctcagcaaccgcaactcggatgtgcagcattacgaggtgggtgacttcgatgtggacgaggtgtacaacaatagcgttggcactggcgtcttcaacaacatgagagcggcggtggccgccggcggtagtcggtacggcggcggaagcctgagtggcggcagtgtctcgtccaggagccaacagcagcagctcaagaatcagcagcaacaacagtcgctggctcagcaaagatcggctcgacgctgcacggcggatgacgatgacgacgaagacgaggaggaggatgaggaggcaacggccgcggagcaattgcacgacagcgtctgtgatgaggatgaggaggaggacgagagcgacttggaggatgatgctcatggattgccaccgcagagcgatgagcggatgcgtcgtctgatggcgatgcaggacgaggattttaagcggcggtttcaacgtcagctgcgcaagcatggagcgccccttgactacggggctctgccaccaggagcaggtccgcaacccgagcacaacggtgcggtttttggggttagcggcggcgttggtgagggctccatgcgtggcgcattccggcagcagcagcagcaagcactgaatgccaagtcgccaggcggccgtttggcggtaaatgagctattcggtcacggcaactcgggaccaccgctgccgccggcgaatcagacgcccgcgcagaagcgccagcagctacagaaactgtcaccacagtccaccacatcatcgtcgtcgcatacatcacacagcaatcccaatccgcatccccaccagctaacccatccgcatccccatcagcatcctccgcaccatcagcagcgccacctgtcggccatgctcgatgagaacaacacggtgcgatgttatctggaaccactggctaagtga

SEQ ID NO: 26 - protein, 1835 aa, Drosophila melanogaster
MKNSKCLPNERRQIRDQLTRSCVFFSIKRASSIISAIVAREPRSNQWNMLMPVREYNKHIAKIPNCKMRQRPTLRATFASLLLLLLIAQTLDLAAASGSAGSGAAAAGAAGPAASGGAGGGSLSSGAPTLIANLTEQGSPVSKYQTAYACEGKKLTIECDPGDVINLIRANYGRFSITICNDHGNVEWSVNCMFPKSLSVLNSRCAHKQSCGVLAATSMFGDPCPGTHKYLEAHYQCISAAQTSTTTNRPSPPPWVLSNGPPIFGNGSGLIHPPGVGAGAPPPPRLPTLPGVVGISGNPGLFNVPPQHTAVTHSTPSSSTTAVGGGRLKGGATSTTTTKHPAGRHDGLPPPPQLHHHHNHHGEDTASPTKPSSKLPAGGNATSPSNTRILTGVGGSGTDDGTLLTTKSSPNRPPGTAASGSVVPGNGSVVRTINNINLNAAGMSGGDDESKLFCGPTHARNLYWNMTRVGDVNVQPCPGGAAGIAKWRCVLMKRIPDSGYDEYDDDISSTTPAPSGGDCLHNSSSCEPPVSMAHKVNQRLRNFDPTWHPATPDLTQCRSLWLNNLEMRVNQRDSSLISIANDMSEVTSSKTLYGGDMLVTTKIIQTVSEKMMHDKETFPDQRQREAMIMELLHCVVKTGSNLLDESQLSSWLDLNPEDQMRVATSLLTGLEYNAFLLADTIIRERSVVQKVKNILLSVRVLETKTIQSSVVFPDSDQWPLSSDRIELPRAALIDNSEGGLVRIVFAAFDRLESILKPSYDHFDLKSSRSYVRNTAILSNDSDVNAGEIQQRLRILNSKVISASLGKGRHIQLSQPITLTLKHLKTENVTNPTCVFWNYIDHAWSANGCSLESTNRTHSVCSCNHLTNFAILMDVVDEHQHSLFTMFDGNMRIFIYISIGICVVFIVIALLTLKLFNGVFVKSARTSIYTSIYLCLLAIELLFLLGIEQTETSIFCGFITIFLHCAILSGTAWFCYEAFHSYSTLTSDELLMEVDQTPKVNCYYLLSYGLSLSVVAISLVIDPSTYTQNDYCVLMEANALFYATFVIPVLVFFVAAIGYTFLSWIIMCRKSRTGLKTKEHTRLASVRFDIRCSFVFLLLLSAVWCSAYFYLRGAKMDDDTADVYGYCFICFNTLLGLYIFVFHCIQNEKIRREYRKYVRQHAWLPKCLRCSKTSISSGIVTGNGPTAGTLCSVSTSKKPKLPLGVSEEAHDDPQQQQQTPVPITEDAIMGATSDCELNEAQQRRTLKSGLMTGTLQAPPQTLGGHVVLERGSTLRSTGHASPTSSAGSTHLIFAHKQQQQQQQQGPLGESYYHQPDYYSWKQPSTGTGGLKTPREYYNNAGAAASSPQQAHEVFYWTQKPNSGHNGKKKRGAGGVPASPSGSLHSRTAAASQVLFYPSYKKTKPGQPTGYPQYAEALDPPLATGNAAAYYQQQQQLRRQQLHQQQQQQQQQQLSSDEEQAEQHAHLLHLQRRAGSQQQLPAPPPHMAQYQQEFMQRQYRNKHSNCDLGMGDAYYNQGSVGGADGGPVYEEILSNRNSDVQHYEVGDFDVDEVYNNSVGTGVFNNMRAAVAAGGSRYGGGSLSGGSVSSRSQQQQLKNQQQQQSLAQQRSARRCTADDDDDEDEEEDEEATAAEQLHDSVCDEDEEEDESDLEDDAHGLPPQSDERMRRLMAMQDEDFKRRFQRQLRKHGAPLDYGALPPGAGPQPEHNGAVFGVSGGVGEGSMRGAFRQQQQQALNAKSPGGRLAVNELFGHGNSGPPLPPANQTPAQKRQQLQKLSPQSTTSSSSHTSHSNPNPHPHQLTHPHPHQHPPHHQQRHLSAMLDENNTVRCYLEPLAK

SEQ ID NO: 27 - DNA, 1245 bp, Drosophila melanogaster
  CDS (1)..(1245)
atgatgcaagagaccggcaatcaaatgggacagacccatatgcaccaacgggttccttttaacgatacggtcctgaaggactatcatctgacgagcaccgatatcgagaagtttgtaaagctatggcaggagtaccagatgaagaacatgacccctcaggtggatgagtgccagggctattgccagggggaaatatacaactggttgcgagcctacaacagcatccatggatacgtttcgctgatgatttgcattttcgggacaatagcaaacatcttgaacataatggtcctgaccagaaaggaaatggccaagacgcccataaataatatacttaagtggctggcggtggccgatatgtttgtgatgctggaatatataccctatacatcgtatcagtatatctatatggggccaggtgaaaaagatttgagctacacctgggcggtttgtctgctggttcacatgcacttcacgcagatcctgcatacgatttccatcggactgactgtcacgctggcggtgtggcggtatgtggctatcagacatccgaacgggggctgtgccaatttcctgctagcacattcccgggaggcgatcctcctgcccttcatcctgtcgccgatcctctgcctgcccacgtactttgtgttccaggtgcgtgagacgtacgacgtggacaaggtcaactcggaggccatgtatcacgtttacttcgataaggactcggtgctctacagattcaacttctggatacattccgtgctcatcaaacttctgccgtgcggcatattaattgtgatcagtgcagtacttatgcacgttttgtgcgaggcatcgagacgtcgcttgaagctgagggattacaacaatcccgccaaatatgccatccagcttaatctgaatgaaaccaaatccaagaagcctcctcgctgtgatcgccgaaacgatcggactacccttttgctggttgcggtgctggttttgtttctgatcacagagtttccgcagggattacttggtctgctgtccggagtgatggagaagtgcttcttcgcccactgctatccgccgtttggagagctgatggatctgctggcgctgatcaacgccgccgtgggattcgtgctgtacggtctgatgtcgaaacagttccggaccaccttccgatcgctgtttatgaagcggcactttggcagcaccgaaatgaccagattgacccgcgtaaccacgacttgcgtctag

SEQ ID NO: 28 - protein, 414 aa, Drosophila melanogaster
MMQETGNQMGQTHMHQRVPFNDTVLKDYHLTSTDIEKFVKLWQEYQMKNMTPQVDECQGYCQGEIYNWLRAYNSIHGYVSLMICIFGTIANILNIMVLTRKEMAKTPINNILKWLAVADMFVMLEYIPYTSYQYIYMGPGEKDLSYTWAVCLLVHMHFTQILHTISIGLTVTLAVWRYVAIRHPNGGCANFLLAHSREAILLPFILSPILCLPTYFVFQVRETYDVDKVNSEAMYHVYFDKDSVLYRFNFWIHSVLIKLLPCGILIVISAVLMHVLCEASRRRLKLRDYNNPAKYAIQLNLNETKSKKPPRCDRRNDRTTLLLVAVLVLFLITEFPQGLLGLLSGVMEKCFFAHCYPPFGELMDLLALINAAVGFVLYGLMSKQFRTTFRSLFMKRHFGSTEMTRLTRVTTTCV

SEQ ID NO: 29 - DNA, 1296 bp, Drosophila melanogaster
  CDS (1)..(1296)
atgagcgaccagattggcaaccccaatgcaacattcagtggcagtggcagtggcagtggcaccaacgccgcctccatcgccgaaagtgtggcggagagcggaccggacttcgatgcacttcgggccgcctgcgaaacgcggctaaatgccagcggtcaactggcgggctccggaggaccaggcgcaggagcaggaacctactgtgccggcacctttgatggctggctttgttggccggatacggctgtcggcacttccgcctacgaactctgcccggacttcatcacgggattcgatccagcaagatatgcccacaaggaatgcggtctcgatggcgagtggttcaagcatccgctgaccaataaaacatggtccaactacacaacctgcgtaaatctcgaagacctcaactggaggcacacagtgaatctgatctccgaggttggctacggcacctcactgctggccattctgctgtcgttggccatattgggttatttcaaatccctgaagtgcgcccgcatcacgctgcacatgaatctgttcgcctcgttcgctgccaataactcgctgtggctggtctggtacctgctggtcatgccgaattcggagctactgcatcagagtccgatgcgctgcgttgccctgcacataacgctacactacttcctcctgtccaattactcctggatgctctgcgagggattctatctgcacaccgtcctcgtcgccgcattcatttccgagaagaggctggtcaaatggctcatcgcattcggctggggctccccggccatcgtcatattcgtctatagcatggctcgcggtctgggcggcacgcccgaggacaatcgtcactgctggatgaaccaaaccaactaccaaaacattctaatggtgcctgtgtgtatctccatgttcctgaacctcctgttcctgtgcaacattgtgcgagtggtccttttgaaactgaatgccccggccagtattcagggcagctgcggtccatcgcgaacggttttgcaagcatttcgggcaacgctgcttttggttcctctgctcggcctccagtacatccttacgccctttcgtcctgcacccaaacatccctgggagaatacatacgaaatcatctcggcgtttacggcctcattccaaggtctgtgcgttgccattttgttttgcttttgcaacggcgaggtgattgcccaaatgaagcgcaagtggcggatgatgtgcttcagcaaccgaccgcggaccaattcctatacagccactcaggtctcgttcttttga

SEQ ID NO: 30 - protein, 431 aa, Drosophila melanogaster
MSDQIGNPNATFSGSGSGSGTNAASIAESVAESGPDFDALRAACETRLNASGQLAGSGGPGAGAGTYCAGTFDGWLCWPDTAVGTSAYELCPDFITGFDPARYAHKECGLDGEWFKHPLTNKTWSNYTTCVNLEDLNWRHTVNLISEVGYGTSLLAILLSLAILGYFKSLKCARITLHMNLFASFAANNSLWLVWYLLVMPNSELLHQSPMRCVALHITLHYFLLSNYSWMLCEGFYLHTVLVAAFISEKRLVKWLIAFGWGSPAIVIFVYSMARGLGGTPEDNRHCWMNQTNYQNILMVPVCISMFLNLLFLCNIVRVVLLKLNAPASIQGSCGPSRTVLQAFRATLLLVPLLGLQYILTPFRPAPKHPWENTYEIISAFTASFQGLCVAILFCFCNGEVIAQMKRKWRMMCFSNRPRTNSYTATQVSFF

SEQ ID NO: 31 - DNA, 1515 bp, Drosophila melanogaster
  CDS (1)..(1515)
atgagtgaccacaaccacatcgattcggtgaacgccagcgggagtgatccgctcctggaactgcacaacctagatggcatcggcgagagcgtggagttgcagtgcctggtgcaggagcacatcgaggcatccacctatggcaacgatagtggccactgcctcacccagttcgattcgattctgtgctggccgaggacagctcgcggtaccctggcggtgctccagtgcatggacgagttgcagggaattcattacgatagcagcaagaatgcaacgaggttctgccacgccaatggaacttgggagaagtacaccaactacgatgcctgcgcccacctgcccgccccagaatccgtgccggagttcgaggtcatcgtggagctgcccaccattatctactacattggatacaccctcagcctggtatcgctctcgctggcgctgattgtttttgcctacttcaaggagctgcgttgcctgcgcaacaccatccacgccaacttgttcttcacgtacatcatgtcggctttgttctggatactcttgttatccgtccagatctccatccgaagtggagtgggcagctgcattgctctgatcaccctgttccacttcttcaccctgaccaacttcttttggatgctggtcgagggtttgtacctgtacatgctggtggttaagactttctccggggacaatttacgctttaatatctacacctccataggctggggtggcccggccttgtttgttgtcacctgggctgtggccaaaagtctgacggtcacctacagcacccccgaaaagtacgaaatcaactgcccctggatgcaggagacccatgtggattggatataccagggacctgtctgtgcggtgctaataatcaatctcacatttctgctgcgtatcatgtgggttctaatcacaaagctgcgctcggccaatacagtggagactcgtcagtataggaaagctgctaaggcactgctggtgctaatcccactttttggcatcacctacctggtggtgctggctggtccctcggaatctggcctaatgggacacatgtttgccgtcctgcgagcgatattactcagcactcagggattctcggtgtcgctgttctactgtttcctcaactcggaggtgcgaaatgcactgagacaccacatttccacgtggcgggacacgcgcaccattcagcttaaccagaaccgacgttataccacgaaaagcttctcgaaaggcggtggttccccccgagccgagagtatgcgacctttgaccagctactatgggcgtggcaagcgggagtcgtgcgtaagttcggccaccaccaccacgctggtgggtcagcatgccccactttcgctccaccggggctccaacaatgccctgcacacgatgcccactttggcggcaaatgccatgagttccggcagcactctgagcgtaatgccccgggccattagtcccctgatgaggcaaggactcgaggagaactcggtgtag

SEQ ID NO: 32 - protein, 504 aa, Drosophila melanogaster
MSDHNHIDSVNASGSDPLLELHNLDGIGESVELQCLVQEHIEASTYGNDSGHCLTQFDSILCWPRTARGTLAVLQCMDELQGIHYDSSKNATRFCHANGTWEKYTNYDACAHLPAPESVPEFEVIVELPTIIYYIGYTLSLVSLSLALIVFAYFKELRCLRNTIHANLFFTYIMSALFWILLLSVQISIRSGVGSCIALITLFHFFTLTNFFWMLVEGLYLYMLVVKTFSGDNLRFNIYTSIGWGGPALFVVTWAVAKSLTVTYSTPEKYEINCPWMQETHVDWIYQGPVCAVLIINLTFLLRIMWVLITKLRSANTVETRQYRKAAKALLVLIPLFGITYLVVLAGPSESGLMGHMFAVLRAILLSTQGFSVSLFYCFLNSEVRNALRHHISTWRDTRTIQLNQNRRYTTKSFSKGGGSPRAESMRPLTSYYGRGKRESCVSSATTTTLVGQHAPLSLHRGSNNALHTMPTLAANAMSSGSTLSVMPRAISPLMRQGLEENSV

SEQ ID NO: 33 - DNA, 1536 bp, Drosophila melanogaster
  CDS (1)..(1536)
atgcgaatagttattggatcgttcaccgcatttcttttgctgttattgcaaaactcaaatgccgaaattcccggttgcgacttcttcgacaccgtagatatttcaaaatcgccaagattcgcgaacggatcgtacctctacgaaggcttgctgatccccgcccatttgacagctgaatatgactacaagctcttggccgacgattcgaaggagaaggtggcgagccacgtacgaggatgtgcctgccaccttaggccatgcatccggttttgttgcccccagtaccaaaagatgcaaaagagcaagtgctatggcgacatgtcggaggacgagctgaacaagcacgatcccttcgtgaacgtgacgctcagcgacgggtcggtggtcaggagacacttcaaggaggatctgatcgtgcagtcggatctggccaagctcggatgtccccggatgtactttctgaatcacgaactgccgggcaatgaattcactctgtttgagaatggctctcttctgcgtcactgggacaaagtggaactgagcaagcgggagtactgcgtccagcatctttcatttaaggatgatagtatccgaattgcaccccacttctgtccactttcgtctgagcactccagaacgtggaagaccgttgcgatagtgatatccttgatatgcataatcctaacgatcagcgtgtacctctatgtcgagaagcttcgcaacctgcacggaaagtgtttcatctgctacttggcctctttgttcttgggctatttcttcctggtcctcaacgtgtggaaatactcctccggcttctgcgttacagcaggattcctgggctacttctccgtcatcgccgcgttcttttggctttctgtcatcagtcttaccctctggaattcatttagcggcaactccagctggttgaaccgtttcttgccacagaatcggttcctttcttacaatttatacgcctggggcatggcgctgctcctgactgcaatcacctatatagctgaccaggtggttaagaacgagaagttgaaaccccgcgtgggcgtcggcaaaaattgttggatctacactggggatatgactgtcatgatctacttctatggcccgatgctactgataatcgttttcaacataacaatgtttgtcccgactgcttttcgtataatgaaagtgaagaaggaagcacaaaactttactcaacagcaaaaaacaaccaataggctcaattcggacaagcagacttacgccctattcctgcgactctttatcatcatgggcttgtcctggagcttggaaataatctcgtttctgttgagcaaaaatcaggcttgggccaaggcttttatggtggctgactacttcaattggtcacagggcaccatcatatttctgctatttgttctgaggcccagcacactgaagctcctgaaggaacggattaagggtgggagggatgaggccggcgccagcgatgaacatatctcacttcagaatacgaaaattgaccccagtgttttttaa

SEQ ID NO: 34 - protein, 511 aa, Drosophila melanogaster
MRIVIGSFTAFLLLLLQNSNAEIPGCDFFDTVDISKSPRFANGSYLYEGLLIPAHLTAEYDYKLLADDSKEKVASHVRGCACHLRPCIRFCCPQYQKMQKSKCYGDMSEDELNKHDPFVNVTLSDGSVVRRHFKEDLIVQSDLAKLGCPRMYFLNHELPGNEFTLFENGSLLRHWDKVELSKREYCVQHLSFKDDSIRIAPHFCPLSSEHSRTWKTVAIVISLICIILTISVYLYVEKLRNLHGKCFICYLASLFLGYFFLVLNVWKYSSGFCVTAGFLGYFSVIAAFFWLSVISLTLWNSFSGNSSWLNRFLPQNRFLSYNLYAWGMALLLTAITYIADQVVKNEKLKPRVGVGKNCWIYTGDMTVMIYFYGPMLLIIVFNITMFVPTAFRIMKVKKEAQNFTQQQKTTNRLNSDKQTYALFLRLFIIMGLSWSLEIISFLLSKNQAWAKAFMVADYFNWSQGTIIFLLFVLRPSTLKLLKERIKGGRDEAGASDEHISLQNTKIDPSVF

SEQ ID NO: 35 - DNA, 1500 bp, Drosophila melanogaster
  CDS (1)..(1500)
atgatagccaacttggtgagcatggaaacggacttggccatgaacatcggcctggacacttccggtgaagcccccacagccctacccccgatgccgaatgtcaccgagacgctgtgggatctggccatggtggtcggtcagtccacacagtggcccctcctggacaccgactcctccgagaacttcagcgaactggtcaccaccgagacaccctacgtgccctacggccgtcgaccggaaacctacatcgtgcccatcctctttgccctgatcttcgtggttggtgtcctgggcaatggcactttgattgtggtcttcctcagtgtgcgacagatgcgaaatgttccaaacacctatattttatcactggccctggccgatctgctggttattataaccactgtgccgctcgcatccacagtttacacagttgagtattggccatatggcagcttcctctgtagcctgtcggagttcatgaaggatgtgtccatcggagtgtcagtgtttacgctgactgcattatccggcgatcggtactttgccatcgtggatcctttgagaaagttccacgctcatggtggtggtcgtcgggccaccagaatgaccttggccaccgcggtttccatttggctactggccatactctgcggacttccagcgctaattggaagtaacctgaagcatctcggcataaacgaaaagtccatagtcatttgctatccgtatccggaggagtggggcatcaactacgccaaatccatggtcctgttgcacttcctggtctactacgccattcctttggttgtcatagcagttttctacgtgctcatcgccctccatttgatgtattcggccagtgttcctggtgaaattcagggagctgtgcgtcaggttcgtgcccgtcgcaaagtggctgttactgtgctggccttcgttgtcatctttggaatttgctttctgccctaccacgtcttcttcctctggttctacttctggcccaccgcccaggatgattacaatgccttctggcatgtgctgcgcatcgtcgcctactgcatgtcctttgccaacagctgtgcgaatcctgtggccctatacttcgtgagcggcgcctttcgcaagcatttcaatagatatctgttttgccgcggagcaagtggacggcgcaagaagcgcggccagcacgataccttctgcatgcaccgggacacctcgctgaccagcacggcctccaagcgtttccagtcccgtcactcctgctaccagagcaccatccgcagctgtcgcctgcaggaaacaacgataaccaccctgccaaatggtgggaatcagaatggagccaacatttcagccgtggaattggcattgcccgtgctccaagcaccaggtcacaatgaagcacccgcaccgccgtcctacggatttttgccgcttaacgagattgtccagcagaccaggtcgagtccggccaagttccaggaatcgctgttgaactga

SEQ ID NO: 36 - protein, 499 aa, Drosophila melanogaster
MIANLVSMETDLAMNIGLDTSGEAPTALPPMPNVTETLWDLAMVVGQSTQWPLLDTDSSENFSELVTTETPYVPYGRRPETYIVPILFALIFVVGVLGNGTLIVVFLSVRQMRNVPNTYILSLALADLLVIITTVPLASTVYTVEYWPYGSFLCSLSEFMKDVSIGVSVFTLTALSGDRYFAIVDPLRKFHAHGGGRRATRMTLATAVSIWLLAILCGLPALIGSNLKHLGINEKSIVICYPYPEEWGINYAKSMVLLHFLVYYAIPLVVIAVFYVLIALHLMYSASVPGEIQGAVRQVRARRKVAVTVLAFVVIFGICFLPYHVFFLWFYFWPTAQDDYNAFWHVLRIVAYCMSFANSCANPVALYFVSGAFRKHFNRYLFCRGASGRRKKRGQHDTFCMHRDTSLTSTASKRFQSRHSCYQSTIRSCRLQETTITTLPNGGNQNGANISAVELALPVLQAPGHNEAPAPPSYGFLPLNEIVQQTRSSPAKFQESLLN

SEQ ID NO: 37 - DNA, 2499 bp, Drosophila melanogaster
  CDS (1)..(2499)
atggcgcacgagaccagctttaatgatgcgcttgactacatttacatagcgaacagcatgaatgacagggcctttctgatagccgaaccgcatcccgaacagccgaatgtcgatggtcaggaccaggacgacgcggagctggaggagctggaagacatggcggtcacggacgatggacagctggaggatacaaataacaacaacaacagcaagcgctactacagctccggtaaaagacgagcggatttcataggcaccctggcgctgaagccaccgcccaccgatgcgaacaccaccaccaccaccgccggctcaccactggccaccgccgctttggctgcggcagccgccagtgcctcggtggcggcagcggctgccaggatcaccgccaaggcggcacacagggcactgaccaccaagcaggatgccacatccacgccagcatcctctccagccctccaactgatcgacatggacaataactacacgaatgtcgcagtcggactgggcgtcatgctgctaaatgacacgctcctcctcgaaggcaacgattccagtttgttcggcgagatgcttgccaaccggagtggccacctggatctgatcaacggcactggcggcctcaatgtgaccaccagcaaagtggccgaagacgattttacgcagctgctgcgaatggccgtcacatcggtgctgctcggtctaatgatactggtcaccataattggcaatgtctttgtcatagcggccattatcctggagcggaatctacaaaacgtggccaactacctggtggcctcattggccgtggccgatctcttcgtggcctgtctggtaatgcccctgggagctgtatacgagatcagccaaggctggatacttggtccggaattgtgcgatatctggacgtcgtgcgatgtcctctgctgcactgcctcgattttgcatctggtggccattgccgtcgatcgttactgggcggtcaccaatatagattacatccactcgcggaccagcaatcgtgtctttatgatgatcttttgcgtttggacggcggcggtgattgtgtccttggcaccacagttcggttggaaggatccagactatctgcagcgtatcgagcagcaaaagtgcatggtctcgcaggatgtttcttatcaggtatttgccacctgttgcacattttacgtgccactgctggtcatcctggcgttgtactggaaaatctatcaaacggcccgcaaacgcatccatcgtcgacgaccgcggcccgtcgatgcggcggtcaataataatcagccggacggaggtgcggcaacagatacgaaacttcatcgactgcgtctacgcctcggcagattctccacggccaaatccaaaaccggaagtgccgtgggcgtctcaggacccgcatccggaggcagggctctgggcctcgtcgatggcaactcaacgaacacggtcaacaccgtcgaggacaccgagttcagcagctcgaatgtggacagcaaaagtcgggcaggcgtcgaggcacccagcacttctggcaaccagatagccaccgtatcgcacctggttgcgctggccaagcagcagggcaagtccaccgccaaatcctcagccgctgtcaacggaatggccccatcgggcaggcaagaggacgatggccagcgaccagaacacggggagcaggaggatcgcgaggagctagtggaccaggacgagcaggttggcccgcagcccacaaccgcaacatcagcaacgacagcggcaggcaccaacgagtcggaggaccaatgcaaggccaacggggtggaggtcctggaggatccgcagttgcaacagcagctcgaacaagtgcagcagctgcagaaatcggttaaatccggcggtggaggtggtgccagtacgtcaaatgccaccacaattacgtcgatatcagcgctatcgccacaaacgccaacatcgcagggagttggaatcgccgccgccgccgctggaccgatgacggccaaaaccagcacgctgacgagctgcaaccagtcgcatccgctatgcggcaccgccaacgaatccccatcgacaccagagccacgtagccgacaaccgacgaccccgcagcagcagccgcatcagcaggcgcaccagcagcagcagcagcaactctccagcatcgccaatccgatgcagaaggtgaacaagcgaaaggagaccctggaggccaaaagggaacggaaggcggccaagacgctggccatcatcaccggcgccttcgtcgtctgctggctgcccttcttcgtcatggcactgaccatgccgctctgtgccgcctgccagatcagcgattccgttgcctcgctcttcctttggctgggctacttcaactccaccctcaatccggttatttacaccatcttcagtccggagttccgacaggccttcaagcgcatcctcttcggcggccaccgaccagtccactaccgcagcgggaagctctga

SEQ ID NO: 38 - protein, 832 aa, Drosophila melanogaster
MAHETSFNDALDYIYIANSMNDRAFLIAEPHPEQPNVDGQDQDDAELEELEDMAVTDDGQLEDTNNNNNSKRYYSSGKRRADFIGTLALKPPPTDANTTTTTAGSPLATAALAAAAASASVAAAAARITAKAAHRALTTKQDATSTPASSPALQLIDMDNNYTNVAVGLGVMLLNDTLLLEGNDSSLFGEMLANRSGHLDLINGTGGLNVTTSKVAEDDFTQLLRMAVTSVLLGLMILVTIIGNVFVIAAIILERNLQNVANYLVASLAVADLFVACLVMPLGAVYEISQGWILGPELCDIWTSCDVLCCTASILHLVAIAVDRYWAVTNIDYIHSRTSNRVFMMIFCVWTAAVIVSLAPQFGWKDPDYLQRIEQQKCMVSQDVSYQVFATCCTFYVPLLVILALYWKIYQTARKRIHRRRPRPVDAAVNNNQPDGGAATDTKLHRLRLRLGRFSTAKSKTGSAVGVSGPASGGRALGLVDGNSTNTVNTVEDTEFSSSNVDSKSRAGVEAPSTSGNQIATVSHLVALAKQQGKSTAKSSAAVNGMAPSGRQEDDGQRPEHGEQEDREELVDQDEQVGPQPTTATSATTAAGTNESEDQCKANGVEVLEDPQLQQQLEQVQQLQKSVKSGGGGGASTSNATTITSISALSPQTPTSQGVGIAAAAAGPMTAKTSTLTSCNQSHPLCGTANESPSTPEPRSRQPTTPQQQPHQQAHQQQQQQLSSIANPMQKVNKRKETLEAKRERKAAKTLAIITGAFVVCWLPFFVMALTMPLCAACQISDSVASLFLWLGYFNSTLNPVIYTIFSPEFRQAFKRILFGGHRPVHYRSGKL

SEQ ID NO: 39 - DNA, 2367 bp, Drosophila melanogaster
  CDS (1)..(2367)
atggagccggtcatgagtctggcattggccgcccatggaccgcctagcatactagagccgctgtttaggaccgtaaccacgagcacaacgaccaccaccaccacgacgaccagcacgacgacgacgacggcgagtcctgcagggtattcgccaggatacccgggcaccactctactgaccgccctgttcgagaacctgacgtccacggcagcgagcgggctatacgatccctattcgggaatgtacggaaaccagacgaacggcaccatcggcttcgagacgaagggacctcggtactcactggcctccatggtggtcatgggcttcgtggcggcgattttgagcacggtgacggtggcgggcaatgtcatggtgatgatatcctttaagatcgacaagcagctgcagacgatcagcaactacttcttgttctcgctggccatcgcggacttcgccattggcgctatatcgatgccgctttttgcggtgaccacaatcctgggctactggcccttgggtcccatcgtctgcgacacctggctggccctggactacctggcatcgaatgcttcagtgctgaacctgctgatcatcagtttcgatcggtacttcagtgtcactcgaccgctgacgtaccgcgccaaaaggaccaccaaccgggcggcggtgatgattggcgccgcctggggcatcagcctgctcctctggccgccctggatctacagctggccctacatcgagggcaagcggacggtgcccaaggacgagtgctacatccagttcatcgagaccaaccagtacatcaccttcggcacggcactggccgccttctacttcccggtcaccatcatgtgcttcctctactggcgcatctggcgcgagacgaaaaagcggcagaaggacctgcccaacctgcaggcgggcaagaaagactccagcaagagatcaaacagcagtgacgaaaacacggtggtgaatcacgcctctggcggcctgctggccttcgcccaggtgggcggaaacgaccatgacacctggcgacgtccgcgctccgagagttcagcggacgcggagagtgtctacatgaccaacatggtcatcgactccggctaccacgggatgcactcgcgcaagtcaagcatcaaaagcacgaatacaatcaaaaaatcgtacacctgcttcggcagcatcaaggagtggtgcattgcgtggtggcactccggtcgcgaggactccgacgacttcgcctacgagcaggaggagccttctgatttaggatgcacctcgatgaacgtgatgcgggacaactactcgatgggcggcagcgtgagcggcgtgcgtccgcccagcattctcctgtcggatgtctcgcccacgccgctgccacgcccaccgcttgcctccatctcgcagctgcaggaaatgagtgcggttacggcgagcacaacggcgaatgtgaataccagtggcaatggcaatggcgccatcaacaacaacaacaacgccagccacaacgggaacggcgcagtgaacgggaatggggccggaaacggaagtggaatcggactgggtacaaccggaaatgcgacgcaccgcgactcgcgcactctgcccgttatcaatcgcattaactcgcggtcggtgagccaggactccgtgtacacgatactcatccgcctgccttccgacggcgcatccagcaacgcggccaacggaggagggggtggccctggtgccggggcagctgcctccgcgtccttgagcatgcaaggcgactgtgcgccctccatcaagatgatacacgaggacgggcccacgacgacggcagcggcagctcctttggcgagcgccgcagccacacgacgacctttgccctcgcgagactctgagttcagcctgccactcggacggaggatgtcccatgcccagcacgatgccaggctactcaacgccaaggtcatacccaagcagctgggcaaggctgggggcggggcagcgggcggcggagtgggcggagcccacgccctcatgaacgcccgcaatgctgccaagaagaaaaagaaatcgcaagagaagcggcaggagtcgaaggcggccaagacgctgtcggctatcctgctgagcttcatcatcacgtggactccgtacaacatcctggtgctgatcaagccgctgaccacctgctccgactgcatacccacggagctgtgggactttttctacgccctgtgctacatcaactcgacgatcaaccccatgtgctacgccttgtgcaacgccaccttccggagaacctacgtccggatcctcacctgcaagtggcacacccggaaccgcgagggcatggtacgcggcgtctacaattag

SEQ ID NO: 40 - protein, 788 aa, Drosophila melanogaster
MEPVMSLALAAHGPPSILEPLFRTVTTSTTTTTTTTTSTTTTTASPAGYSPGYPGTTLLTALFENLTSTAASGLYDPYSGMYGNQTNGTIGFETKGPRYSLASMVVMGFVAAILSTVTVAGNVMVMISFKIDKQLQTISNYFLFSLAIADFAIGAISMPLFAVTTILGYWPLGPIVCDTWLALDYLASNASVLNLLIISFDRYFSVTRPLTYRAKRTTNRAAVMIGAAWGISLLLWPPWIYSWPYIEGKRTVPKDECYIQFIETNQYITFGTALAAFYFPVTIMCFLYWRIWRETKKRQKDLPNLQAGKKDSSKRSNSSDENTVVNHASGGLLAFAQVGGNDHDTWRRPRSESSADAESVYMTNMVIDSGYHGMHSRKSSIKSTNTIKKSYTCFGSIKEWCIAWWHSGREDSDDFAYEQEEPSDLGCTSMNVMRDNYSMGGSVSGVRPPSILLSDVSPTPLPRPPLASISQLQEMSAVTASTTANVNTSGNGNGAINNNNNASHNGNGAVNGNGAGNGSGIGLGTTGNATHRDSRTLPVINRINSRSVSQDSVYTILIRLPSDGASSNAANGGGGGPGAGAAASASLSMQGDCAPSIKMIHEDGPTTTAAAAPLASAAATRRPLPSRDSEFSLPLGRRMSHAQHDARLLNAKVIPKQLGKAGGGAAGGGVGGAHALMNARNAAKKKKKSQEKRQESKAAKTLSAILLSFIITWTPYNILVLIKPLTTCSDCIPTELWDFFYALCYINSTINPMCYALCNATFRRTYVRILTCKWHTRNREGMVRGVYN

SEQ ID NO: 41 - DNA, 1953 bp, Drosophila melanogaster
  CDS (1)..(1953)
atggatctaaagactggctctctcctggtagcacccgccgtgaagaactccagctgctcgcatccgcgctactccggccacaatttcatcgcccacatagggattgcggagaccatcgaggcggtgctcatcctggtcctcacactgggcgtcatcggggccaactgcctggtcatcttcgtcatcaacaaccgccgctatgcggcctacatacaccaacagccccgttatctgctcacctcgctggccctgaatgacctgacaattggtctgctaattacaccattcggtctaatgccggcattgttccactgctggccgtacggagagatcttctgtcagatacaggccctgctccgaggggcgctttcccagcagagcgccgtcatcctggtttgcatggcagtcgatagatacatgtgtgccctgcatccgcgccgctactaccagcactccagcaagaagggctgcgtggccatactgagcttaacctggattatcagcctgacggtgtttggctttctggtgctgcccaaaggttactacttcaacaatacgggtctaatggcctgcgagcccttctacagcaagccatcctacaggatactgtccacgtgcgccctctactttcccacgacgatggtgctgatgtactgctacggctccagcttccacatgagccgcttccggctaaacgatccgaccatgcccctcacggcggccgcccaccacccccatccgcacccacatcccaccgccgcccagcagctgcagatgcaccagcaccagcaacatcaccagcaggcgggaatgcactcgcacctctaccacggccactcgcatcaccccagccaccccagtcacccaaaccaccccaaccaccacggccacccccaccatcatggaccgcccgttatgggccatctcagcatggccatgagcatgggactggccggcatgccgaacatgacaaacaagattaccaaaaagattgttcccatccaagagaagaactccagcggatccacctcgcgctcgatggccgccatttcactgggcttcatagtgatggtcactccgtggacgattcaggaaatagtcaccgcctgcacgggatccaagctgccgccgttcctcgatttcctggtcacctggacggcgctgagcaatagtctgtggaacccgttcatgtactggctgctgaactccgatttccgccgcatgagtcgccagctgatgccgaacaaatgcttcccccacgaggatacgcccgagcacaaatcaggctgttgtcacatcaatgctaacgatttcgaaatcacaacgcttccgattcccccggagccgccatcatcccgtcctccgggcggagcaggaggaggaggtggaggtccatccagtggaggtcccagctctggcggcggagtggccagttccattggcggctccgtccttggaatctgcggccgctcgcgcacaaacagcctcagccgcagcgcctcccagtacatccgagggacaatgggcggaggagtccacaatcaccaggccacggaagccttctccaccacgaggcctgacattgagggcctctccgagaagtactggggcgagatcctggagagaaccgtcagctcgggcaacctgaatgccatgcagaagcacctgccgccccacctgccctacgcccaccacctggtccaccagatccaccagccgcagcagcaccaccaacagcagaccacctccttcagcaaggccagcgatctgcagctaaacctgaacctcagccaagcagccacggctgccgagctgggcaagttctccaactcggagccgaagctgtgcgagcacctctttcacgacgtgaactgcgccaagagcaaggccgccaacggggatggggagtcctccggcaagctggcctgcggtcgcagcattccggacatctag

SEQ ID NO: 42 - protein, 650 aa, Drosophila melanogaster
MDLKTGSLLVAPAVKNSSCSHPRYSGHNFIAHIGIAETIEAVLILVLTLGVIGANCLVIFVINNRRYAAYIHQQPRYLLTSLALNDLTIGLLITPFGLMPALFHCWPYGEIFCQIQALLRGALSQQSAVILVCMAVDRYMCALHPRRYYQHSSKKGCVAILSLTWIISLTVFGFLVLPKGYYFNNTGLMACEPFYSKPSYRILSTCALYFPTTMVLMYCYGSSFHMSRFRLNDPTMPLTAAAHHPHPHPHPTAAQQLQMHQHQQHHQQAGMHSHLYHGHSHHPSHPSHPNHPNHHGHPHHHGPPVMGHLSMAMSMGLAGMPNMTNKITKKIVPIQEKNSSGSTSRSMAAISLGFIVMVTPWTIQEIVTACTGSKLPPFLDFLVTWTALSNSLWNPFMYWLLNSDFRRMSRQLMPNKCFPHEDTPEHKSGCCHINANDFEITTLPIPPEPPSSRPPGGAGGGGGGPSSGGPSSGGGVASSIGGSVLGICGRSRTNSLSRSASQYIRGTMGGGVHNHQATEAFSTTRPDIEGLSEKYWGEILERTVSSGNLNAMQKHLPPHLPYAHHLVHQIHQPQQHHQQQTTSFSKASDLQLNLNLSQAATAAELGKFSNSEPKLCEHLFHDVNCAKSKAANGDGESSGKLACGRSIPDI

SEQ ID NO: 43 - DNA, 1542 bp, Drosophila melanogaster
  CDS (1)..(1542)
atggtctcgccattgataattcttttaattatttggctctccgtgggcgcaaagtccgtggagatcgccagtataaaccatccctgtgcctacgcccacacggtcaacattacggatgggctgcggatgaaggatggctcctactcatacgctggagtagtggtcccaccgcatctgatggcggagtactccttcaaggtgatcgatggagtggagtaccgggccaagaaacatctgcgcggctgcgtctgtctgctgaagccctgcatcagtttctgttgtccggagaacctcgtctttgatgccaagcactggaactgcacaatgccacaccaagtccgcgagtccactcacgtggagctcacctacgctaacaggacggtggatcaagtacgcatacgcgatcgttttgtggtgcgcacagagctgggttgccggaacaaattcgtggacaaaaagcacgataacttctggcaatgggacctcttcgagaatggaacgctgcggcgggacaatcgtctgtggtcaacggatgagtattgctttagcccgttggagcacaatccggagcagtgggagctcactccgctcaactgcgaacgctttcaaacggggtaccgggtttggatttacgccatttgcagtattatagccatcattataaacattttcatactctccctacttggatctgtgagagatgcccgtaaaagccactatggccagttaatcatctactacttgctgtccatgatcgttggttactccctgttggtctacttggccttgaagaatcccatgaagctctcgcatgtggcctgcaggaacataggatttctggcctacttctgcatcatgctctccttcgtctttctggccatttgcagtcttgactttctgctcaaatttaaacaaaaggctgttaggagctccgtccgccgattgtcccttgctctggcagttcttgcagtgattggtcttcggtttttggtctccttagcccaggactccaagctgcccaagcacttcaagccaggcatgggagaagattactgctggttcgatgttcgcacctggggtattttgatctactactacggacccattgcactcctcctgatattcagcattgtatgctgtctcaaggcgtacttttccatctacgaactgccaccggatactcagtacatattgggcactcaactgaaaatcgtcaagacgcatttctatgcctttagcgcttacatagtgggcgtgtttgcggtctggatccgagaaatagtcgtgtatataatggccagagtgagagagcatttcttcatcattgacttctggagtggaatttgcattctgggcctggccatagctggttttatcctgctccttggcaagaatttgcacgtcaaatcctggtgggccattaatgtggaatcaagtcagacagatctgagtattattaatgctcgcgtatacaagttcgatgagaaaggcgatctaaaatcttcagactctccctacaagccgacagtgacatcactttaa

SEQ ID NO: 44 - protein, 513 aa, Drosophila melanogaster
MVSPLIILLIIWLSVGAKSVEIASINHPCAYAHTVNITDGLRMKDGSYSYAGVVVPPHLMAEYSFKVIDGVEYRAKKHLRGCVCLLKPCISFCCPENLVFDAKHWNCTMPHQVRESTHVELTYANRTVDQVRIRDRFVVRTELGCRNKFVDKKHDNFWQWDLFENGTLRRDNRLWSTDEYCFSPLEHNPEQWELTPLNCERFQTGYRVWIYAICSIIAIIINIFILSLLGSVRDARKSHYGQLIIYYLLSMIVGYSLLVYLALKNPMKLSHVACRNIGFLAYFCIMLSFVFLAICSLDFLLKFKQKAVRSSVRRLSLALAVLAVIGLRFLVSLAQDSKLPKHFKPGMGEDYCWFDVRTWGILIYYYGPIALLLIFSIVCCLKAYFSIYELPPDTQYILGTQLKIVKTHFYAFSAYIVGVFAVWIREIVVYIMARVREHFFIIDFWSGICILGLAIAGFILLLGKNLHVKSWWAINVESSQTDLSIINARVYKFDEKGDLKSSDSPYKPTVTSL

SEQ ID NO: 45 - DNA, 1758 bp, Drosophila melanogaster
  CDS (1)..(1758)
atgccgaagaaaattcatcagcctggaggatccctatactgcggagttacattgctgggcgtcctgtgcttggtcgtgttccggttgattccggggattcccttcggcacttacgttatggccgagagagaccactaccacaccatagacgatccaaatgtgccctgtaatttctacgatacagtgaatctgacgggccataggctctttcccaacggaagctatgattactacggcacaatagttcccgcagaactggtcgggacgtacgactacatacacagctcgctaacggagcgcatagaggttcgggaacacgttaggggatgcgtctgcaagttcaagtcctgcctgaatatctgctgcccgtggcggcaggtctttaactctgaagttgacggatgcataatagaccactcggacaaccgaacgtggccagatccgcctatgctcaatataaccttccgcaacgagtctacgatattggtcaacatgtttacgcagtttgctatccaaagcttcagaccctgccccaagatgttttctctgcagccagagaccaacaattgggatgattatctactctttgagaacggatccatgctccgtgtggacgataaactgctaatcaggaagaacgagttctgcatggttccgacatacgtcaacgaatcggacatgttctacaccatacatccggccaattgtgacatgcaggacgatcatagcacggtaaagattatcaattcgtatgccatgatgttctccattcccttcatgatgcttaccatagccgtttacctattgattcccgagctccgcaaccagcacggaaagagcttggtctgctatttaatagggctctccgtgggttactcctcgctgtgctacgtgcaactctatcaagttgatgccactggtgttacatgcaaagtgtttggatacacagcatatttcttttttatgggtgcctacatgtggctaagtgtcattagctttgacttgtggcacaatttccgagggacgagaggaattaaccgattccaggagaagaaacgcttcctgttttattcgctgtactcttggggtattgccctagttttcctagccttcacctattgcgcccagcaacttaccaatttgcccgcgaacctaaagccaggtattggtgatggtgtatactgctggctggatatgagcaactgggcagccatgatctatttctacggtcccattctggcgatcgttgttgccaacaccatcatgttcataatgacggcgattaagattcacggcgtgcagcgcgagatggcccggataattgcgagtgagaatagcaccaagaacctacgaaccgagaaggacaaacgtttttatcgtgcttggtccaactatagattcggcttgttcttacgcctctttctcataatgggcatcacctggctcacggagcttatctcgtacttcgtgggcagcgacaagggatggtctaagctcttttatatctcggatctggccaatgcgatgcagggctttctcattttcatgttgtttgtaatgaagaagaaggtcaagcacttgatcacaaacagatgctcgagtgttcgcgatggcagcaaccaacgtcagagccagtactccaccaagaccacgtcgagcagcgtggccaatctgtcgctgcacgagaagccatcggtggagaagccgctagtgatcagctcgagcgtggatccccagaaaaccaccatcttccgctga

SEQ ID NO: 46 - protein, 585 aa, Drosophila melanogaster
MPKKIHQPGGSLYCGVTLLGVLCLVVFRLIPGIPFGTYVMAERDHYHTIDDPNVPCNFYDTVNLTGHRLFPNGSYDYYGTIVPAELVGTYDYIHSSLTERIEVREHVRGCVCKFKSCLNICCPWRQVFNSEVDGCIIDHSDNRTWPDPPMLNITFRNESTILVNMFTQFAIQSFRPCPKMFSLQPETNNWDDYLLFENGSMLRVDDKLLIRKNEFCMVPTYVNESDMFYTIHPANCDMQDDHSTVKIINSYAMMFSIPFMMLTIAVYLLIPELRNQHGKSLVCYLIGLSVGYSSLCYVQLYQVDATGVTCKVFGYTAYFFFMGAYMWLSVISFDLWHNFRGTRGINRFQEKKRFLFYSLYSWGIALVFLAFTYCAQQLTNLPANLKPGIGDGVYCWLDMSNWAAMIYFYGPILAIVVANTIMFIMTAIKIHGVQREMARIIASENSTKNLRTEKDKRFYRAWSNYRFGLFLRLFLIMGITWLTELISYFVGSDKGWSKLFYISDLANAMQGFLIFMLFVMKKKVKHLITNRCSSVRDGSNQRQSQYSTKTTSSSVANLSLHEKPSVEKPLVISSSVDPQKTTIFR

SEQ ID NO: 47 - DNA, 1440 bp, Drosophila melanogaster
  CDS (1)..(1440)
atggccagtggcaacaatgaaactgagccgctctactgcggcagcggcatggataattttcatacaagctacaagaacatgcatggctatgtttcgctggtggtctgcatcctgggcaccatcgcgaataccttgaatatcattgtgctaacccgacgggagatgcgctcccccacgaatgccatactcacgggtctggccgtggccgacctggcagttatgctggagtatataccctataccatacacgactacatcctgacggacagtttgccgcgggaggagaagctcagctacagctgggcctgcttcatcaagttccattcgattttcgcccaggttctgcacaccatttccatttggctgacggtgaccctggctgtttggcgttatatagcggtgggttatccgcaaaagaatcgcgtgtggtgcggtatgagaaccaccataataacgataaccaccgcctatgtggtgtgtgttctggtggtgtcgccgtcgctctatttgatcacggctataaccgaatatgtggatcagttggatatgaatggcaaagtgataaactccattcccatgacccagtacgttatcgattatcgtaatgagttactgagtgccaggacggccgccctgaatgccacgcccaccagtgcaccactgaacgaaactgtgtggttaaatgcgagcaccttgctgacatcgacaaccaccgctgcaccacccacaccatcgccagtggtgcgaaatgttactgtctataggctataccacagcgatttggcgttgcacaatgcctcgctgcaaaatgccacatttctcatatacagtgtagtgattaagctgataccatgcatagcactcaccattctgtcggttcgattgatcctggccttactggaggccaagcggcggcggaagaagctcaccagcaagcccgccactccgggtgccagtaatggaaccaaatcaccggccaatggtaaagcagcggataggccccggaaaaatagcaaaactctggaaaaggaaaagcagacggatcgcaccacgagaatgctgctggcggtgctactcctctttctcatcactgaatttccacaagggattatgggtctgctgaatgctgtgctcggagatgtcttctatctgcagtgctacctaagactgagtgacctgatggatatcttggccctgatcaactccagcatcaacttcattttgtactgctccatgagcaagcaattccgcaccacgttcacgctgctctttcgtccaaaattcctggacaagtggctgccggtggcgcaggacgagatggcagctgctcgagctgaacgctctgcggtggcgccagtcctggaaaacagcagacgacagcagccgcaggtggtgatggccagcacgaccaccaacatcacgcaggtgacaaatctgtag

SEQ ID NO: 48 - protein, 479 aa, Drosophila melanogaster
MASGNNETEPLYCGSGMDNFHTSYKNMHGYVSLVVCILGTIANTLNIIVLTRREMRSPTNAILTGLAVADLAVMLEYIPYTIHDYILTDSLPREEKLSYSWACFIKFHSIFAQVLHTISIWLTVTLAVWRYIAVGYPQKNRVWCGMRTTIITITTAYVVCVLVVSPSLYLITAITEYVDQLDMNGKVINSIPMTQYVIDYRNELLSARTAALNATPTSAPLNETVWLNASTLLTSTTTAAPPTPSPVVRNVTVYRLYHSDLALHNASLQNATFLIYSVVIKLIPCIALTILSVRLILALLEAKRRRKKLTSKPATPGASNGTKSPANGKAADRPRKNSKTLEKEKQTDRTTRMLLAVLLLFLITEFPQGIMGLLNAVLGDVFYLQCYLRLSDLMDILALINSSINFILYCSMSKQFRTTFTLLFRPKFLDKWLPVAQDEMAAARAERSAVAPVLENSRRQQPQVVMASTTTNITQVTNL

SEQ ID NO: 49 - DNA, 1650 bp, Drosophila melanogaster
  CDS (1)..(1650)
atgagtggtacagcggttgcgcggctcctgctccgcctggagctaccctcgccaggcgtaatgccaccaccgcccacggactacgattacggtggacccatcagcgacgatgagttcctggccagtgcgatggccaccgagggcccaacggtacgctacgatttgtttccgcagaacaacagtcagcccactctgcaaatcgtccttaaccacacggaggtgcaaacggatctgcaatatccccactacgaggacctgggcctggatcccgatccgaattggacacgaatctgcgaggatgtgtacaacccactgctggagaacaatcgcattgagttctgggtgtgcggagtactgataaatatcgttggtgtcctcggcatcctaggcaacataatctccatgataatcctctcccgaccacagatgagatccagtatcaactacttgctcactggattggcccgctgtgatacggtgctgattatcacctctatcctgctgtttggaatacccagcatatatccatatacgggtcactttttcggctactacaactatgtttatccgtttatatcgccggcggtattccctataggcatgatagcccagacagctagtatatatatgacatttacggtgaccttagagagatatgtagccgtttgccatcctctgaaggcgagagcactctgcacttacggaagagctaaaatatatttcatagtttgtgtatgcttctcgttggcctacaatatgcccagattttgggaggtcctgactgtcacctatcccgaaccgggcaaggatgtaatactccactgcgtgagaccttcgagactgagaagatcggagacctacatcaacatatacatacactggtgctacctgatagtgaactatatcataccctttctcaccctagccatactaaattgtctgatatacaggcaggtgaagagggctaatagggagcgccagaggttatcgagatcagagaaaagggagatcggattggccacaatgctgctgtgcgtggtgatagtgttctttatgctcaactttctaccgctggtgctcaatatatccgaggccttctatagcaccatcgatcataaaattacgaagatctccaatctactgatcaccatcaatagcagtgtcaactttctcatttacatcatcttcggcgaaaagttcaagcgcatttttttactcatttttttcaagcgccgcctgagtcgtgaccaaccggatcttatccactacgagagctccatatcgaacaacggcgatggaactctgaaccaccgatcctccggccgcttctcgaggcacggcacccagcggagcaccaccaccacctacctggtggccaccggaggaccaggcggtgggggatgcggtggtggcggtggcaataattccctcaataatgtccgactgacccaggtctcgggatcacccggtctggtcaagatcaagcgaaatcgagctccctcgcctggtccagtggtttactttcccgcccgcgaaatgcagagatccgcatccacaacaaattcaacaaccaataacaacacttctattggttacgactggaccctgccggacagcaaaaaactgggacacgtctcctctggattctga

SEQ ID NO: 50 - protein, 549 aa, Drosophila melanogaster
MSGTAVARLLLRLELPSPGVMPPPPTDYDYGGPISDDEFLASAMATEGPTVRYDLFPQNNSQPTLQIVLNHTEVQTDLQYPHYEDLGLDPDPNWTRICEDVYNPLLENNRIEFWVCGVLINIVGVLGILGNIISMIILSRPQMRSSINYLLTGLARCDTVLIITSILLFGIPSIYPYTGHFFGYYNYVYPFISPAVFPIGMIAQTASIYMTFTVTLERYVAVCHPLKARALCTYGRAKIYFIVCVCFSLAYNMPRFWEVLTVTYPEPGKDVILHCVRPSRLRRSETYINIYIHWCYLIVNYIIPFLTLAILNCLIYRQVKRANRERQRLSRSEKREIGLATMLLCVVIVFFMLNFLPLVLNISEAFYSTIDHKITKISNLLITINSSVNFLIYIIFGEKFKRIFLLIFFKRRLSRDQPDLIHYESSISNNGDGTLNHRSSGRFSRHGTQRSTTTTYLVATGGPGGGGCGGGGGNNSLNNVRLTQVSGSPGLVKIKRNRAPSPGPVVYFPAREMQRSASTTNSTTNNNTSIGYDWTLPDSKKLGHVSSGF

SEQ ID NO: 51 - DNA, 969 bp, Drosophila melanogaster
  CDS (1)..(969)
atgcaggaaatgagctacctacaggataattccaaggtggaggccctcaccaaggcggtgctcatatcgatactgggcgtggccatcgtcctgtccaacctcctcataatcgccacctatgccaacttcaagggacccacagaggtgatcaactactacctcttgtccctggccatcgccgatctgctctgcggactcctggtggtgcccttctccgtgtatcccgctttgaccggagaatggatgtacggcgacatcgtgtgtcgcttcaccggctatctggaggtcactctgtgggcggtatcggtatacaccttcatgtggatatcagtggatcgctatcttgcggtgcggaagccactcagatatgaaacggtgcagacgaaaacgagatgccaatgctggatggtgttcacttggatatcggcggccctgctgtgctgtcccccaatcctgggctactcgatgcccatcgagaacaacatgacgcacatttgcatgctggactgggggaatatggcagcatatagcgccaccttggcgatattagtcttaggtcccagcctcatttcaatcgtacacaactacggctatatctttgtaatgatgcgtaagattaggtccggcgagccgatacacgataaagaatatgcaactgctctggctgaaaatttatcgaaccctagtcatatgatgtcattcgcattggtctttgcattctgggtgtcctggctgccatggattctgttgcgtctgtacgaggtggtcacgggcgatgttatccaaagtactcttatcaacttcgccgtcgtctggatcggcatattgaattcgttttggaaaattctgatcatgaccagtatgtcgccgcaattccgtatcgctttgagagtattttgcttaaccatttgttgtaagactaagggccgtttgcaagcagagctaatcgggttggacccagatgactag

SEQ ID NO: 52 - protein, 322 aa, Drosophila melanogaster
MQEMSYLQDNSKVEALTKAVLISILGVAIVLSNLLIIATYANFKGPTEVINYYLLSLAIADLLCGLLVVPFSVYPALTGEWMYGDIVCRFTGYLEVTLWAVSVYTFMWISVDRYLAVRKPLRYETVQTKTRCQCWMVFTWISAALLCCPPILGYSMPIENNMTHICMLDWGNMAAYSATLAILVLGPSLISIVHNYGYIFVMMRKIRSGEPIHDKEYATALAENLSNPSHMMSFALVFAFWVSWLPWILLRLYEVVTGDVIQSTLINFAVVWIGILNSFWKILIMTSMSPQFRIALRVFCLTICCKTKGRLQAELIGLDPDD

SEQ ID NO: 53 - DNA, 1629 bp, Drosophila melanogaster
  CDS (1)..(1629)
atgggcatggacttaatcgagcaggagtcccgcctggaattcctgcccggagccgaggaggaagcggaatttgagcgtctatacgcggctcccgctgagattgtggccctgttgtccattttctatgggggaatcagtatcgtggccgtcattggcaacactttggtcatctgggtggtggccacgaccaggcaaatgcggaccgtgacaaatatgtatatcgctaatttggcttttgccgatgtgattattggcctcttctgcataccatttcagttccaggctgccctgctgcagagttggaacctgccgtggttcatgtgcagcttctgccccttcgtccaggccctgagtgtaaatgtctcggtattcacgctgaccgccattgcaatcgatcggcatagggccatcattaatccacttagggcacgtcccaccaagttcgtatcgaagttcataattggtggaatttggatgctggccctgctatttgcggtgccctttgccattgcctttcgtgtggaggagttgaccgaaagatttcgcgagaacaatgagacctacaatgtgacgcggccattctgcatgaacaagaacctatccgatgatcaattgcaatcctttcgctacaccctggtttttgtgcagtatctggttccattctgtgtcatcagctttgtctacatccagatggcggtacgattgtggggcacacgtgctcctggtaacgcacaggattcacgggacataacgctgttgaaaaacaagaagaaggtcatcaaaatgctgattatcgtggtcattatctttggactctgctggctgccactgcagctctataatattctgtatgtcacgataccggaaatcaacgactaccacttcattagcatcgtctggttttgctgcgattggctggccatgagcaatagctgctacaatccctttatttatggcatctacaatgaaaaatttaagcgggaattcaacaagcgatttgcggcctgtttctgcaagttcaagacgagcatggacgcccacgaaaggaccttttcgatgcacacccgcgccagctccataaggtcaacctacgccaactcctcgatgcgaatccggagtaatctctttggtccggcgcgtggtggtgtcaacaatgggaagccgggcttgcatatgccgcgggtgcatggatccggtgctaacagcggcatttacaacggaagtagtgggcagaacaacaatgtcaatggccaacatcatcagcatcaaagcgtggttacctttgcggccactccgggtgtttcggcaccaggtgttggcgttgcaatgccgccgtggcggcgaaacaacttcaaacctctgcatccgaacgtaatcgaatgcgaggacgacgtggcactcatggagctgccatcaaccacgccccccagcgaggagttggcatccggggccggagtccagttggccctgctaagcagggagagctccagctgcatttgcgaacaggaatttggcagccaaaccgaatgcgatggcacctgcatactcagcgaggtgtcgcgagtccacctgcccggctcgcaggcgaaggacaaggatgcgggcaagtccttgtggcaaccactttag

SEQ ID NO: 54 - protein, 542 aa, Drosophila melanogaster
MGMDLIEQESRLEFLPGAEEEAEFERLYAAPAEIVALLSIFYGGISIVAVIGNTLVIWVVATTRQMRTVTNMYIANLAFADVIIGLFCIPFQFQAALLQSWNLPWFMCSFCPFVQALSVNVSVFTLTAIAIDRHRAIINPLRARPTKFVSKFIIGGIWMLALLFAVPFAIAFRVEELTERFRENNETYNVTRPFCMNKNLSDDQLQSFRYTLVFVQYLVPFCVISFVYIQMAVRLWGTRAPGNAQDSRDITLLKNKKKVIKMLIIVVIIFGLCWLPLQLYNILYVTIPEINDYHFISIVWFCCDWLAMSNSCYNPFIYGIYNEKFKREFNKRFAACFCKFKTSMDAHERTFSMHTRASSIRSTYANSSMRIRSNLFGPARGGVNNGKPGLHMPRVHGSGANSGIYNGSSGQNNNVNGQHHQHQSVVTFAATPGVSAPGVGVAMPPWRRNNFKPLHPNVIECEDDVALMELPSTTPPSEELASGAGVQLALLSRESSSCICEQEFGSQTECDGTCILSEVSRVHLPGSQAKDKDAGKSLWQPL

SEQ ID NO: 55 - DNA, 1539 bp, Drosophila melanogaster
  CDS (1)..(1539)
atgttactttctgcatcgatcctaatatatttcttgctgaatctgcaatcttcgagtgctgagattgccgactgcagtttctatgataccgttgatatctcggaaggccagaggctctcgaatggatcatacctctacgagggattacttattcccgcccatttgacggccaagtatgaattcaagcttctggcgaatggagataaggagcaggtgccaagtcacgtgagaggatgtgtgtgcaagctaaggacttgcgtcaggttttgctgcccacatgaccacataatggatatgggcgaatgctacgccaacatgacgacggaggagaacgaattactggaccccatgctaaatgtgaccctggacgacggatcagtggtgcaaaggcactataagaaggagctcatggtgcagtgggatctgccaaagccctgcgatgatatgttttacctagacaaccgggatataatggatgagtacaccttgttcgagaatggaagattgctgcgccactacgatcaagtgtatttggacaagtcggagtactgtctgcagcaccgaacattcggcgaaggtaacaacaactccattcgcattataccccacaactgcttgatactgccatccagaacgggacagaccgttgtgatgatcacatcgttgatatgcttggttcttaccatcgccgtgtacctgtgcgttaagaagctaatgaatttggagggcaagtgtttcatctgttacatgatgtgcctatttttcggatacctgttcctactccttgatctgtgggagttatcgctcgatttctgtaaagcagcaggtttcttgggatactttttcgtcatggctgcgttcttttggctatctatcatcagtcggcactattggaaatgtcttaccaatccctgtgcctcgatgaacattcggtcagaacgtgcgtttctgctatacagctgcttcgcctgggcaatgcctttggccttgaccggagtcacctatctggctgataacgttgtgaacaacgaggagtggcagcctcgcgtgggcgacgaagggcattgctggatctatactaaaagctggtctgcaatggtgtacttctatggaccgatggtgctcctgattctcttcaacataactatgtttgttctgacggctaaacacataatagattccaagaggactcttcgaaagattgctcgcaatgaaggtagaatacagaagctgaattcggacaaacagaattacacacaatttctgctgctcttcactgtgatgggggtgtcgtggagctttgagatattctcctacttggtgcaacgcgagaaactgtgggtcaatgtctttctggcagctgactacttcaactggtcccaaggcgtcattatatttgtgctattcattctgcggcgcaaaactcttgtactattcaagaaacaaatatttcccaaacagagagcctttagtagatctgcaactcaaagtacgattgaatccatctctcaaacaaaaaggcattttaacatgacatag

SEQ ID NO: 56 - protein, 512 aa, Drosophila melanogaster
MLLSASILIYFLLNLQSSSAEIADCSFYDTVDISEGQRLSNGSYLYEGLLIPAHLTAKYEFKLLANGDKEQVPSHVRGCVCKLRTCVRFCCPHDHIMDMGECYANMTTEENELLDPMLNVTLDDGSVVQRHYKKELMVQWDLPKPCDDMFYLDNRDIMDEYTLFENGRLLRHYDQVYLDKSEYCLQHRTFGEGNNNSIRIIPHNCLILPSRTGQTVVMITSLICLVLTIAVYLCVKKLMNLEGKCFICYMMCLFFGYLFLLLDLWELSLDFCKAAGFLGYFFVMAAFFWLSIISRHYWKCLTNPCASMNIRSERAFLLYSCFAWAMPLALTGVTYLADNVVNNEEWQPRVGDEGHCWIYTKSWSAMVYFYGPMVLLILFNITMFVLTAKHIIDSKRTLRKIARNEGRIQKLNSDKQNYTQFLLLFTVMGVSWSFEIFSYLVQREKLWVNVFLAADYFNWSQGVIIFVLFILRRKTLVLFKKQIFPKQRAFSRSATQSTIESISQTKRHFNMT

SEQ ID NO: 57 - DNA, 1740 bp, Drosophila melanogaster
  CDS (1)..(1740)
atggaggacgagtggggctcctttgatcgcctgcccagtgttccgagtgcctcaatggatttggagacggaaaacgaggtggtcagcaattggtccacactggccaacttcacgcgacttgtggctggtgccgctcctgaaatcgtcaactatacgctcaacatgatcgacgtgggtgtgggcatggccacggatatatccaatctgagcgtgagcaccacgcccctgcccgcctacgcaatctctaatagctcctcgctggcgcacaccaatagtcgccatgaagcaccaccgatggcggaacaggttccggagcacgtgatggatcacgcacctcaactatcccgatccgggttactaaaagtgtatgtcctggcggtaatggcactgttctctctgctgggcaacctgctgaccatctggaatatctacaaaacccgcatctcaagaagaaactcacggcacacgtggagtgctatctactcactgatgttccatctgtccatcgccgatgtcctggtcacctggttctgcatcatcggggaggccgcgtggtgctacaccgtccagtggctggccaatgagctcacctgcaagctggtgaagctcttccagatgtttagcctctacctgagcacctatgtcctggtcctcatcggagtggaccgctggatagcggtcaagtatccgatgaagtcgctcaacatggccaagaggtgtcataggctacttggcggtacttacatcctgtcgctggtgctcagcttgccacagttcttcatcttccatgtagcgcgtggcccattcgtggaggagttctaccagtgcgtcacccacggattctacacggcggattggcaggagcagatgtacgccaccttcacgctggtcttcaccttcctgctgccgctgtgcatactgtttggcacctacatgtccaccttccgcaccatttccagcagcgaaaagatgttccagggatcaaagttggccaactactcaacggccaaattgcccacgcagacgaatcgccagaggctgatacacaaggccaagatgaagtcgcttcgcatatccgtggtgatcatcatagcgttcctcatctgctggacgccctactacgtcatgatgattatgttcatgttcctcaatccggacaaaaggctgggcgacgatctgcaggacgccatcttcttcttcggcatgtcaaacagcctggtcaacccactcatctacggtgccttccacctgtgtcctggcaaagggggcaagtcgagcggcgggggcggcaacaacaacgcctacagcttgaacaggggcgactcgcagcgcactccatccatgctaacggcggtgacgcaggtggacggcacaggtggcagttcccgccagatgcgggccttccgccagcagagctactaccgcagctcctccaacggcacagccggaccgggtgcagctccctttaaggagcaggttggcctgctgcacgtgggtcccggcaatgggacgcccggtggctccgtctctagcggcgccacgccgcagttgatccgtaagggatcggctctgttggcccgacaacccagctgtctgagggagcaggagcaccagcagcgtttgctgctgcacgagaagccctcgaccctggtgctcagctacgacagccagcggggcggagtgggcgtgggcgtggccagcggtctgctggacaacaacgagcgagtgtcgagcgtgtga

SEQ ID NO: 58 - protein, 579 aa, Drosophila melanogaster
MEDEWGSFDRLPSVPSASMDLETENEVVSNWSTLANFTRLVAGAAPEIVNYTLNMIDVGVGMATDISNLSVSTTPLPAYAISNSSSLAHTNSRHEAPPMAEQVPEHVMDHAPQLSRSGLLKVYVLAVMALFSLLGNLLTIWNIYKTRISRRNSRHTWSAIYSLMFHLSIADVLVTWFCIIGEAAWCYTVQWLANELTCKLVKLFQMFSLYLSTYVLVLIGVDRWIAVKYPMKSLNMAKRCHRLLGGTYILSLVLSLPQFFIFHVARGPFVEEFYQCVTHGFYTADWQEQMYATFTLVFTFLLPLCILFGTYMSTFRTISSSEKMFQGSKLANYSTAKLPTQTNRQRLIHKAKMKSLRISVVIIIAFLICWTPYYVMMIMFMFLNPDKRLGDDLQDAIFFFGMSNSLVNPLIYGAFHLCPGKGGKSSGGGGNNNAYSLNRGDSQRTPSMLTAVTQVDGTGGSSRQMRAFRQQSYYRSSSNGTAGPGAAPFKEQVGLLHVGPGNGTPGGSVSSGATPQLIRKGSALLARQPSCLREQEHQQRLLLHEKPSTLVLSYDSQRGGVGVGVASGLLDNNERVSSV

SEQ ID NO: 59 - DNA, 1452 bp, Drosophila melanogaster
  CDS (1)..(1452)
atgtttacgtggctgatgatggacgtcctccagtttgtgaaaggggaaatgacagccgattcagaggcaaatgccacaaattggtataacacgaacgagagcttatataccacggaactgaaccatagatggattagtggtagttccacaattcagccagaggagtccctttatggcactgatttgcccacctatcaacattgcatagccacgcggaattcctttgctgacttgttcactgtggtgctctacggatttgtgtgcattatcggattatttggcaacaccctggtgatctacgtggtgttgcgcttttccaaaatgcaaacggtcacgaatatatatatcctgaatctggcggtggcagacgagtgcttcctgattggaataccctttctgctgtacacaatgcgaatttgcagctggcgattcggggagtttatgtgcaaagcctacatggtgagcacatccatcacctccttcacctcgtcgatttttctgctcatcatgtccgcggatcgatatatagcggtatgccacccgatttcctcgccacgatatcgaactctgcatattgccaaagtggtctcagcgattgcctggtcaacttcagcggtcctcatgctgcccgtgatcctttatgccagcactgtggagcaggaggatggcatcaattactcgtgcaacataatgtggccagatgcgtacaagaagcattcgggcaccaccttcatactgtacacatttttcctaggattcgccacaccgctgtgctttatcctgagtttctactacttggttataaggaaactgcgatcggtgggtcccaaaccaggaacgaagtccaaggagaagaggcgggctcacaggaaggtcactcgactggtactgacggtgataagtgtatacattctatgttggctccctcactggatttctcaggtggccctgattcactcgaatcccgcgcaaagggacctctcccgactggaaatactcattttcctgcttctgggggcactggtttactcgaattcggcggtgaatcccatactttatgccttcctaagtgagaacttccggaagagcttcttcaaggcctttacctgtatgaataagcaggatatcaacgctcaactccagctggagcccagtgttttcaccaaacagggcagtaaaaagaggggtggctccaagcgcctgttgaccagcaatccgcagattcctccactgctgccactgaatgcgggtaacaacaattcatcgaccaccacatcctcgaccacgacagcggaaaagaccggaaccacggggacacagaaatcatgcaattccaatggcaaagtgacagctccgccggagaatttgattatatgtttgagcgagcagcaggaggcattttgcaccaccgcgagaagaggatcgggcgcagtgcagcagacagatttgtaa

SEQ ID NO: 60 - protein, 483 aa, Drosophila melanogaster
MFTWLMMDVLQFVKGEMTADSEANATNWYNTNESLYTTELNHRWISGSSTIQPEESLYGTDLPTYQHCIATRNSFADLFTVVLYGFVCIIGLFGNTLVIYVVLRFSKMQTVTNIYILNLAVADECFLIGIPFLLYTMRICSWRFGEFMCKAYMVSTSITSFTSSIFLLIMSADRYIAVCHPISSPRYRTLHIAKVVSAIAWSTSAVLMLPVILYASTVEQEDGINYSCNIMWPDAYKKHSGTTFILYTFFLGFATPLCFILSFYYLVIRKLRSVGPKPGTKSKEKRRAHRKVTRLVLTVISVYILCWLPHWISQVALIHSNPAQRDLSRLEILIFLLLGALVYSNSAVNPILYAFLSENFRKSFFKAFTCMNKQDINAQLQLEPSVFTKQGSKKRGGSKRLLTSNPQIPPLLPLNAGNNNSSTTTSSTTTAEKTGTTGTQKSCNSNGKVTAPPENLIICLSEQQEAFCTTARRGSGAVQQTDL

SEQ ID NO: 61 - DNA, 1803 bp, Drosophila melanogaster
  CDS (1)..(1803)
atggccaacttaagctggctgagcaccatcaccaccacctcctcctccatcagcaccagccagctgccattggtcagcacaaccaactggagcctaacgtcgccgggaactactagcgctatcttggcggatgtggctgcatcggatgaggataggagcggcgggatcattcacaaccagttcgtgcaaatcttcttctacgtcctgtacgccacggtctttgtcctgggtgtcttcggaaatgtcctggtttgctacgtagttctgaggaatcgggccatgcagactgtgaccaatatattcatcacgaatctggccctgtcggacatattgctctgcgtcctggcggtgccatttactccgctttacacgttcatgggtcgctgggccttcggcaggagtctgtgccatctggtgtcctttgcccagggatgcagcatctacatatccacgctgaccctcacctcgattgccatcgatcggtacttcgttatcatataccccttccatccgcgcatgaagctctccacctgcatcgggatcatagtgagcatctgggtgatagccctgctggccaccgttccctacggcatgtacatgaagatgaccaacgagctggtgaacggaacgcagacaggcaacgagaccctggtggaggccactctaatgctaaacggaagctttgtggcccagggatcaggattcatcgaggcgccggactctacctcggccacccaggcctatatgcaggtgatgaccgccggatcaacgggaccggagatgccctatgtgcgggtgtactgcgaggagaactggccatcggagcagtaccggaaggtgttcggtgccatcacaaccactctgcagtttgtgctgcccttcttcatcatctcgatttgctacgtgtggatatcggtgaagctaaaccagcgggccagggccaagccgggatcgaaatcctcgagacgggaggaggcggatcgggatcgcaagaagcgcaccaaccgcatgctcatcgccatggtggcggtattcggactcagctggctgcccatcaatgtggtcaacatattcgatgacttcgatgacaagtccaacgagtggcgcttctacatcctattcttctttgtggcccactctattgccatgagctccacctgctacaatcccttcctgtacgcctggctgaacgagaacttccgcaaggagttcaagcacgtgctgccctgctttaatccctcgaacaacaacatcatcaacatcaccaggggctataatcggagtgatcggaacacctgtggtccgcgactgcatcatggcaagggggatggtggcatgggcggtggcagtctggacgccgacgaccaggacgagaacggcatcacccaggagacctgtctgcccaaggagaagctgctgattatccccagggagccgacttacggcaatggcacgggtgccgtgtcgccaatccttagcgggcgcggcattaacgccgccctggtgcacggtggcgaccatcagatgcaccagctgcagccgtcacaccatcaacaggtggagctgacgaggcgaatccgccggcggacagacgagacggacggggattacctggactccggcgacgagcagaccgtggaggtgcgcttcagcgagacgccgttcgtcagcacggataataccaccgggatcagcattctggagacgagtacgagtcactgccaggactcggatgtgatggtcgagctgggcgaggcaatcggcgccggtggtggggcagagctggggaggcgaatcaactga

SEQ ID NO: 62 - protein, 600 aa, Drosophila melanogaster
MANLSWLSTITTTSSSISTSQLPLVSTTNWSLTSPGTTSAILADVAASDEDRSGGIIHNQFVQIFFYVLYATVFVLGVFGNVLVCYVVLRNRAMQTVTNIFITNLALSDILLCVLAVPFTPLYTFMGRWAFGRSLCHLVSFAQGCSIYISTLTLTSIAIDRYFVIIYPFHPRMKLSTCIGIIVSIWVIALLATVPYGMYMKMTNELVNGTQTGNETLVEATLMLNGSFVAQGSGFIEAPDSTSATQAYMQVMTAGSTGPEMPYVRVYCEENWPSEQYRKVFGAITTTLQFVLPFFIISICYVWISVKLNQRARAKPGSKSSRREEADRDRKKRTNRMLIAMVAVFGLSWLPINVVNIFDDFDDKSNEWRFYILFFFVAHSIAMSSTCYNPFLYAWLNENFRKEFKHVLPCFNPSNNNIINITRGYNRSDRNTCGPRLHHGKGDGGMGGGSLDADDQDENGITQETCLPKEKLLIIPREPTYGNGTGAVSPILSGRGINAALVHGGDHQMHQLQPSHHQQVELTRRIRRRTDETDGDYLDSGDEQTVEVRFSETPFVSTDNTTGISILETSTSHCQDSDVMVELGEAIGAGGGAELGRRIN

SEQ ID NO: 63 - DNA, 1428 bp, Drosophila melanogaster
  CDS (1)..(1428)
atgaattcatcgaccgatccgacattttccgagttaaacgcaagtttcacaaataccccagataccctattcgccactagtgttagttcggatccatcccatggatttggagaggaggactatgcctgcggcacctttaactgctctccaaaagagtttgtggcctttgtgcttggaccacagaccttaccactttacaaggcagttttgataacaattatttttggtggcatatttataaccggggtcgttggtaatctcttagtgtgcattgtgattattcgccactcggcaatgcacacggcgaccaattactatctgttcagcctagctgtttcagatctgctgtacctactatttggattaccaacggaagtgtttctgtactggcatcagtatccggatctcttcggcatgccattctgcaaaatacgcgcatttatttcagaggcatgcacctatgtctccgtctttaccatcgtcgcattttccatggagagattcctggccatttgccatccattgcacctgtatgctatggttggcttcaagcgcgcgattcggataataacagctctttggattgttagttttataagcgccattccatttggactgctctcggatattcaatacctcaactacccattagatcattcccgcattgaggagtcggcattctgttccatgtcgcccaagattgttaacgaaattcccgtgttcgaagtatccttttgcattttctttgtcattccgatgatactcatcattttgctctacggacgaatgggagccaagattcgatctcgaacgaaccaaaaattgggtgttcaacaaggcaccaacaacagggaaacgagaaactcccaaatgagaaagaagacggttattcgcatgttggctgctgtggtgattacgtttttcgtgtgctggttcccgttccacctgcaaagactcatattcctgtatgccaagaacatggataactatttggacataaacgaggcactcttctcgattgcgggatttgcgtactacgtttcatgcaccgtaaatccaatagtgtacagtgtgatgtcacgtcgctacagggttgcgttcagggaactcctctgcggaaaagccgtgggcgcctattacaacagcggatttgcgagggatcactccagtttccgggaaagctccgcctacgaccgcgttcattctgttcacgtcagagccagccagcatccaaataagttcgaaacggactcctcatctgcaaatagggtgctgataaagaaaacctacagcctcccgctaccaaaaaatgcggactccacggtcctgagcaccacggacattgtcatcgtgctggaaaacagccacacagtttgcgaggagcccaaagttgagaacgatatttggatcgagaacgaggagacttgt

SEQ ID NO: 64 - protein, 476 aa, Drosophila melanogaster
MNSSTDPTFSELNASFTNTPDTLFATSVSSDPSHGFGEEDYACGTFNCSPKEFVAFVLGPQTLPLYKAVLITIIFGGIFITGVVGNLLVCIVIIRHSAMHTATNYYLFSLAVSDLLYLLFGLPTEVFLYWHQYPDLFGMPFCKIRAFISEACTYVSVFTIVAFSMERFLAICHPLHLYAMVGFKRAIRIITALWIVSFISAIPFGLLSDIQYLNYPLDHSRIEESAFCSMSPKIVNEIPVFEVSFCIFFVIPMILIILLYGRMGAKIRSRTNQKLGVQQGTNNRETRNSQMRKKTVIRMLAAVVITFFVCWFPFHLQRLIFLYAKNMDNYLDINEALFSIAGFAYYVSCTVNPIVYSVMSRRYRVAFRELLCGKAVGAYYNSGFARDHSSFRESSAYDRVHSVHVRASQHPNKFETDSSSANRVLIKKTYSLPLPKNADSTVLSTTDIVIVLENSHTVCEEPKVENDIWIENEETC

SEQ ID NO: 65 - DNA, 2565 bp, Drosophila melanogaster
  CDS (1)..(2565)
atggagatgcaaagctactctggtcgtggaccatcgacaggcacatcagaaacagcaacagcaacagcagcagttgcatctgcatctgcatcagacacagcagcaacattcacactgcgacacttcaattgtcggctggaagaggcggattggcctgggcctcgccagccgtttattgactgcgaaggcagccacaccaacagcacatcctacacccccagcagcctgcccaccagcaaaaacctcatcgagggacccaacaacacattccagtgtgcacggcaagctatcgacgaagcggagcacaacgcattctatagttgcgatggggaaagcccattgtctgaaaactgcactttgaggctgaaggcgcgactgttgcgatggccgtacgaggcgtatgagcacattcgactggcaatcaacggggcactcagtgattatgctagtgataaacttagtgatagttcgagctgcgatgaaggaggcatggtgttgcaatgtaagctgggtcaggcccatgaactattgctttgtcatttgcaacaactcgagagggagccactgcgggaggtgggaagcgcggaggagagcttctccaacgacagccttctgcaggcctttcaaatcgaactgggcgcagagcgcgatggactctggtccttccttaatctaagcgagctaatggagcccgatcacggattcctgggcatcatgaatgtcaccaacactagcttagacatgtttttgccgaaccttacagccctgaacacgacctccacggcctccactgcagacatggccaccgagttcgcggtaacaaagagctttctggactacagtccccacggctacgatttcctattcctgttcgtggtgttctttatcttcgcgggtggcctgggtaatatccttgtgtgcctagccgttgccttggaccggaaactgcagaatgtgactaactacttcctgttttccctggctatagccgatctcctggtcagtttgtttgtgatgcccatgggcgcgataccagcttttttggggtattggccacttggctttacctggtgcaacatttatgtgacgtgtgacgtactggcctgctcatccagtatattgcacatgtgcttcatcagtttgggacgctatatgagaataagaaatccattgggctcgaggcatcgatctacgaaacgattgactggtataaagatagccattgtttgggtaatggccatgatggtatccagttcaataaccgttcttggtctggtcaatgaaaagaacataatgcccgagcctaacatatgcgttatcaacaatcgcgcctttttcgtgtttggatctctggtagctttttatatacccatgctgatgatggttaccacatacgcattgacgattcccctcctccggaagaaagcgcgatttgccgccgagcacccggaaagtgaactttttcgcaggttgggtggacgcttcaccctaaggccgcagcacagccagcagcagttgcagatgttcagtagcttttctggcagcaataacaaattcctatcaatgggcgacggcaatcgcaacttcaacactgaaggagagatggaggagggtggagctcctagcagaaggagtggcgtagagcccgccgaacgacctttgatgcaacagcgaacggcgagcagcaggagcatgggcacggttagtttccgtaatgtcgtgaacgggactagcggagccgcaggaagtgggcgcaggacgacaggcactgcccacagcagcttccggttctctggcgccggcatccttcggcactcgtcgtcgtctcccgcctcgagctgccactccaccagcacgtcgcgttcgagctccttctggcgcaaacacggcggctatccaaacctaatggacagccatccaaatcgacgggcatctgtgcgtgtcaccatctcccagccacaattgggttacccgaccaatgtaggtggaaatggaggtggaactgttggagcgacggaggtgggggctggtggcaatggctcatcagccggcagaacgagcaactcatctcctggaggcacgagcttgatgaaaatcgcaaccatccagggaccgatactgaaccaaagtcaggcagctggaggcaatcacatggtgcaaaaggtgaagccgacggctttaaaaccggaagaaccacagcgcaacaaagtgcggccctttaaatttgccttcaaccgcgttgccacgcccaccctcaatttgcgttttctaaacaatcgcagtaaacgaaacagcttgtcggccaatgccgttgctacggagcagaaggccaccaaggtgctcggattggtgtttttcaccttcgttctgtgctggtcgcctttcttcatcttgaacattatatttgccgcatgccccgagtgccaagtgccggagcacgtggtgaatacctgcctttggcttggctatgtctcctcgacgatcaatcccatcatctacaccatattcaatcgcacgttccgggcggcctttatccgcctgctcaagtgcaactgcaaacggtga

SEQ ID NO: 66 - protein, 854 aa, Drosophila melanogaster
MEMQSYSGRGPSTGTSETATATAAVASASASDTAATFTLRHFNCRLEEADWPGPRQPFIDCEGSHTNSTSYTPSSLPTSKNLIEGPNNTFQCARQAIDEAEHNAFYSCDGESPLSENCTLRLKARLLRWPYEAYEHIRLAINGALSDYASDKLSDSSSCDEGGMVLQCKLGQAHELLLCHLQQLEREPLREVGSAEESFSNDSLLQAFQIELGAERDGLWSFLNLSELMEPDHGFLGIMNVTNTSLDMFLPNLTALNTTSTASTADMATEFAVTKSFLDYSPHGYDFLFLFVVFFIFAGGLGNILVCLAVALDRKLQNVTNYFLFSLAIADLLVSLFVMPMGAIPAFLGYWPLGFTWCNIYVTCDVLACSSSILHMCFISLGRYMRIRNPLGSRHRSTKRLTGIKIAIVWVMAMMVSSSITVLGLVNEKNIMPEPNICVINNRAFFVFGSLVAFYIPMLMMVTTYALTIPLLRKKARFAAEHPESELFRRLGGRFTLRPQHSQQQLQMFSSFSGSNNKFLSMGDGNRNFNTEGEMEEGGAPSRRSGVEPAERPLMQQRTASSRSMGTVSFRNVVNGTSGAAGSGRRTTGTAHSSFRFSGAGILRHSSSSPASSCHSTSTSRSSSFWRKHGGYPNLMDSHPNRRASVRVTISQPQLGYPTNVGGNGGGTVGATEVGAGGNGSSAGRTSNSSPGGTSLMKIATIQGPILNQSQAAGGNHMVQKVKPTALKPEEPQRNKVRPFKFAFNRVATPTLNLRFLNNRSKRNSLSANAVATEQKATKVLGLVFFTFVLCWSPFFILNIIFAACPECQVPEHVVNTCLWLGYVSSTINPIIYTIFNRTFRAAFIRLLKCNCKR

SEQ ID NO: 67 - DNA, 1446 bp, Drosophila melanogaster
  CDS (1)..(1446)
atgaatcagacggagcccgcccagctggcggatggggagcatctgagtggatacgccagcagcagcaacagcgtgcgctatctggacgaccggcatccgctggactaccttgacctgggcacggtgcacgccctcaacaccactgccatcaacacctcggatctgaatgagactgggagtaggccgctggacccggtgcttatcgataggttcctgagcaacagggcggtggacagcccctggtaccacatgctcatcagcatgtacggcgtgctaatcgtcttcggcgccctaggcaacaccctggttgttatagccgtcatccggaagcccatcatgcgcactgctcgcaatctgttcatcctcaacctggccatatcggacctacttttatgcctagtcaccatgccgctgaccttgatggagatcctgtccaagtactggccctacggctcctgctccatcctgtgcaaaacgattgccatgctgcaggcactttgtattttcgtgtcgacaatatccataacggccattgccttcgacagatatcaggtgatcgtgtaccccacgcgggacagcctgcagttcgtgggcgcggtgacgatcctggcggggatctgggcactggcactgctgctggcctcgccgctgttcgtctacaaggagctgatcaacacagacacgccggcactcctgcagcagatcggcctgcaggacacgatcccgtactgcattgaggactggccaagtcgcaacgggcgcttctactactcgatcttctcgctgtgcgtacaatacctggtgcccatcctgatcgtctcggtggcatacttcgggatctacaacaagctgaagagccgcatcaccgtggtggctgtgcaggcgtcctccgctcagcggaaggtggagcgggggcggcggatgaagcgcaccaactgcctactgatcagcatcgccatcatctttggcgtttcttggctgccgctgaactttttcaacctgtacgcggacatggagcgctcgccggtcactcagagcatgctagtccgctacgccatctgccacatgatcggcatgagctccgcctgctccaacccgttgctctacggctggctcaacgacaacttccgtaaagaatttcaagaactgctctgccgttgctcagacactaatgttgctcttaacggtcacacgacaggctgcaacgtccaggcggcggcgcgcaggcgtcgcaagttgggcgccgaactctccaaaggcgaactcaagctgctggggccaggcggcgcccagagcggtaccgccggcggggaaggcggtctggcggccaccgacttcatgaccggccaccacgagggcggactgcgcagcgccataaccgagtcggtggccctcacggaccacaaccccgtgccctcggaggtcaccaagctgatgccgcggtaa

SEQ ID NO: 68 - protein, 481 aa, Drosophila melanogaster
MNQTEPAQLADGEHLSGYASSSNSVRYLDDRHPLDYLDLGTVHALNTTAINTSDLNETGSRPLDPVLIDRFLSNRAVDSPWYHMLISMYGVLIVFGALGNTLVVIAVIRKPIMRTARNLFILNLAISDLLLCLVTMPLTLMEILSKYWPYGSCSILCKTIAMLQALCIFVSTISITAIAFDRYQVIVYPTRDSLQFVGAVTILAGIWALALLLASPLFVYKELINTDTPALLQQIGLQDTIPYCIEDWPSRNGRFYYSIFSLCVQYLVPILIVSVAYFGIYNKLKSRITVVAVQASSAQRKVERGRRMKRTNCLLISIAIIFGVSWLPLNFFNLYADMERSPVTQSMLVRYAICHMIGMSSACSNPLLYGWLNDNFRKEFQELLCRCSDTNVALNGHTTGCNVQAAARRRRKLGAELSKGELKLLGPGGAQSGTAGGEGGLAATDFMTGHHEGGLRSAITESVALTDHNPVPSEVTKLMPR

SEQ ID NO: 69 - DNA, 3060 bp, Drosophila melanogaster
  CDS (1)..(3060)
atgcggtcgcttaacaagtcggcgggcgaggaggagctgactggcctgaatggcaactccagcgactccatctataccatcaagaacaagtggatcaccgactggagccttagaagggagcgggataagctgtgcagcttcattttcaagcgagtcctgacgcacacggagtgcaaacgtctgttggaggcggccaagatctatggcgagagcagtgacttcaattcctggccggttaatgaacagctgcaatggtacaggaacttcgatgtgaacaatacgaaccttctgttggctgttagaaatcaatcctctgatggcggttccaccatgtcgggatccagttccgactcggagattcttggtcctgttttgccaccatttgcactgtggcagacgatcctgatagccatatgcctggcgatctgtatcattcttacggtgggcggtaatatcctggtgctactggccttcatcgtggacaggaatattcggcagcccagcaactactttattgcctccctagcagccacggatatgctaataggaaccgtttcgatgcccttctacacgatatacgtgctcaagggttattgggacctgggtccgatgctctgcgatctctggctttccgtcgactatactgtgtgtctggtgtcccagtacacggtgctgttgatcacgatagatcgctactgctctgtgaagattgccgccaagtaccggagttggaggacgagaaccagagtgatatatatggtcacaatcacttggatcattcccgctctgctcttcttcatctcgatttttggatgggagcacttcaccggcaagcgggatctacttcctggccagtgcgccgttcagtttctcaaggatccgatctttaatacggccctaatcattggctactattggaccacactaattgtgctttttgtcttatatgccgggatctacaaaacagcctatgatatgcaaaagcgcagtgaggcgaagcaacggaaaatgcaatccatggtggcactgagtgctggagcgatgtccggaatggcaggtcatgcagctggcattggtgtgattgaggagaaaatcctaaagaccaaagtggaacttgcgggagatcaaaccgatttggatagtgcctgcaccacagtgattaagagattaagtggttccggtcaggcaaatcctctggccgtggccaccgaggaagtggagaagatgacaccggaacagaggagagcgtcggcagcaaaaatccaggaggaggcgaaaaaacgtgaggcagccgtggatgcggaaaagagcgagagatccagcagtcctgccttcgattccgatgaggaatcatccgtcaaccaggcccagcagttgatcacccagcagaaattgaacaacatgaggaagcggtcatcgattggtctggtctttggggcacaggccgccctgctggccactcgtggcaaaggtaacttgcagaagagcaccactaactccaagtcgatcgaggccatgcaccagtaccaccaccaccaacagcaccatcacaaccagagtccgttacagcgggcgcagagcaaggaagagatgcgctccctgcaccaccaccagaaccagcaacaaccgcaccaccagcaccaccaaaaccagccgaacccaccgctggacaggcccaagcgcacatcctgctccacactgtcccagatagccgagcatgatcgtttggtcgacctgtccgctcctccaacattactcaacaccagtgatcccctgtcccccgtggacttggcacccatcgaggtccctagcgatcaagtgcatcagggtctggtgcagaccattttgccacctcccgacgcctttcagtgccccaccccgctctccgatgactactcggatcgtccctttgggaatagttccggtaacagtgaactggccctgacctatgacctgatgacgaactcggagctacgctatatggacgagagctccgccatgctggccagtgtgacggccaactcgacgacctccccgaatgacagcgtccaggggaaaccaccagtcctgcctccaccaccgcccgcacgccgaaatccaccaaaatcgaacctgaaccagagcctcagtcaaactcccagccaaaaccagagtcccagccaaagcctgagcctcaacctgaatccgaatcacaaccagagtcagagtcagagtatcgaggaggcggtggccattgaaaaacgtcttctcgtctcgtacacaggaatcgaggactttgctaaggtgaggcgggagagctgcattgaggccatctgcctgttggatgtgcccggaaagctagctgcggactgtccccatcgccgggcctccagtcctatggagaccagcagcaaggatgccatactctattccccgatgccaccaatgccactctcacccaaggtaaagacttcaacgccacaaacgggaacgccccagtcggcggcgggtgtaacaccaccggtgccactggaaaggattgaggagcgagaaacctcggacagtaataccaacaagatgccctccacctcgggcaccaccagcagtacgggcggtgtgggtggaggcggggaacaagacggtgttggtgccaccaaaaagaacgcgggggatgacgatgccaacagggaggagaagagtttggcggccagccgaaactccagcaaaagggcattcattcattcgataggaaagcacttcaagagcaagaaggctctacccctgatccttggagtgggtggacggcagaagtccaagtcggagaatcgtgctcgcaaagcgtttcgcacgatctcgttcattttgggctgcttcgtggcctgctggacaccctaccatgtgttggccctcgtcgagggattctgccggcatccgccctgcatcaatgaacacctctacatgttctcgtacttcctctgctacgccaacagcccgatgaatcctttttgctacgctctggccaatcagcagttcaagaagacctttacgcggatcctcaagggggatctgcacatgacctaa

SEQ ID NO: 70 - protein, 1019 aa, Drosophila melanogaster
MRSLNKSAGEEELTGLNGNSSDSIYTIKNKWITDWSLRRERDKLCSFIFKRVLTHTECKRLLEAAKIYGESSDFNSWPVNEQLQWYRNFDVNNTNLLLAVRNQSSDGGSTMSGSSSDSEILGPVLPPFALWQTILIAICLAICIILTVGGNILVLLAFIVDRNIRQPSNYFIASLAATDMLIGTVSMPFYTIYVLKGYWDLGPMLCDLWLSVDYTVCLVSQYTVLLITIDRYCSVKIAAKYRSWRTRTRVIYMVTITWIIPALLFFISIFGWEHFTGKRDLLPGQCAVQFLKDPIFNTALIIGYYWTTLIVLFVLYAGIYKTAYDMQKRSEAKQRKMQSMVALSAGAMSGMAGHAAGIGVIEEKILKTKVELAGDQTDLDSACTTVIKRLSGSGQANPLAVATEEVEKMTPEQRRASAAKIQEEAKKREAAVDAEKSERSSSPAFDSDEESSVNQAQQLITQQKLNNMRKRSSIGLVFGAQAALLATRGKGNLQKSTTNSKSIEAMHQYHHHQQHHHNQSPLQRAQSKEEMRSLHHHQNQQQPHHQHHQNQPNPPLDRPKRTSCSTLSQIAEHDRLVDLSAPPTLLNTSDPLSPVDLAPIEVPSDQVHQGLVQTILPPPDAFQCPTPLSDDYSDRPFGNSSGNSELALTYDLMTNSELRYMDESSAMLASVTANSTTSPNDSVQGKPPVLPPPPPARRNPPKSNLNQSLSQTPSQNQSPSQSLSLNLNPNHNQSQSQSIEEAVAIEKRLLVSYTGIEDFAKVRRESCIEAICLLDVPGKLAADCPHRRASSPMETSSKDAILYSPMPPMPLSPKVKTSTPQTGTPQSAAGVTPPVPLERIEERETSDSNTNKMPSTSGTTSSTGGVGGGGEQDGVGATKKNAGDDDANREEKSLAASRNSSKRAFIHSIGKHFKSKKALPLILGVGGRQKSKSENRARKAFRTISFILGCFVACWTPYHVLALVEGFCRHPPCINEHLYMFSYFLCYANSPMNPFCYALANQQFKKTFTRILKGDLHMT

SEQ ID NO: 71 - DNA, 1515 bp, Drosophila melanogaster
  CDS (1)..(1515)
atgtcggagattgtcgacaccgagctgctggtcaactgcaccatcctcgccgtccgtcgattcgagctgaatagcattgtgaacaccacgctcctgggcagtctcaacagaaccgaggtggtcagcctcttgtcgagcattatcgacaatcgggataatctcgagagcatcaatgaggccaaagactttctgaccgagtgcctgtttccatcgccgacaagaccgtacgagttgccatgggagcagaaaacgatttgggccataattttcggtctgatgatgtttgtggccattgctggcaatggtattgttctctggatcgttacaggacatcgcagcatgaggacggtcacaaattacttcctgctgaacttgagcatcgccgacctgctgatgtcgtcgctgaactgcgtcttcaactttatattcatgctgaactcagattggccattcggttcgatttattgcacaatcaacaatttcgtggccaacgtcacggtctctacgtcggtcttcacgctcgtggccataagtttcgatagatacatcgccattgtgcatccgctgaaacgccgcacgtcgcgtcggaaggtgcgcatcatcctggtcctgatctgggcactcagctgtgtgctgtcggcgccatgtctgctctactccagcatcatgaccaagcactattacaatggaaaatcgaggacagtctgcttcatgatgtggccagatggacgatatcccacttctatggctgattatgcatacaacctgatcatcctggtactgacctacggcattcccatgattgtgatgctcatatgctactctctcatgggtcgtgtcctgtggggcagtagatcaatcggcgagaacacggatcgccagatggagtcgatgaagtcgaagcggaaggtggtgcgcatgtttattgccatcgtgtccatctttgccatttgctggctgccgtatcacctgttcttcatctacgcctaccacaacaaccaggtggcatccacgaagtacgtgcaacatatgtatctcggtttctactggctggccatgtccaatgctatggtcaatccgctcatttactactggatgaataagaggttccggatgtacttccagcggatcatctgctgctgttgcgtgggcctcacccgccatcgattcgactcgccgaagagccggttgacgaacaagaacagctcgaaccggcacacaagagcggagaccaagagtcagtggaagcgcagcacgatggagacgcagatccagcaggcgccggtcaccagctcttgccgggagcagcggagtgcacagcagcagcagccacccggaagtggaaccaatcgggcagccgtcgagtgtattatggaacggccggcggatggatccagttcgccgctgtgcctttcgatcaacaacagcatcggtgagcggcagcgcgtgaaaatcaaatacatctcctgtgacgaggacaataatcccgtggagctcagtcccaagcagatgtga

SEQ ID NO: 72 - protein, 504 aa, Drosophila melanogaster
MSEIVDTELLVNCTILAVRRFELNSIVNTTLLGSLNRTEVVSLLSSIIDNRDNLESINEAKDFLTECLFPSPTRPYELPWEQKTIWAIIFGLMMFVAIAGNGIVLWIVTGHRSMRTVTNYFLLNLSIADLLMSSLNCVFNFIFMLNSDWPFGSIYCTINNFVANVTVSTSVFTLVAISFDRYIAIVHPLKRRTSRRKVRIILVLIWALSCVLSAPCLLYSSIMTKHYYNGKSRTVCFMMWPDGRYPTSMADYAYNLIILVLTYGIPMIVMLICYSLMGRVLWGSRSIGENTDRQMESMKSKRKVVRMFIAIVSIFAICWLPYHLFFIYAYHNNQVASTKYVQHMYLGFYWLAMSNAMVNPLIYYWMNKRFRMYFQRIICCCCVGLTRHRFDSPKSRLTNKNSSNRHTRAETKSQWKRSTMETQIQQAPVTSSCREQRSAQQQQPPGSGTNRAAVECIMERPADGSSSPLCLSINNSIGERQRVKIKYISCDEDNNPVELSPKQM

SEQ ID NO: 73 - DNA, 1494 bp, Drosophila melanogaster
  CDS (1)..(1494)
atgctcgtaaaaacgcttggcgcgaattttgcagccgggcaaaatgcaaaaaaatgcagctgctgcgctctgctgatttccctgctctgcgtattacttcttagtctaaaccctttaccagtaaccagtcatgtcactagcgccggatcatcaacagccctatcttccgatcccaacctagtgctggtcaacaaatgctgcgagaagttcgagatacacgtggaccatgagtgtcagcaggtcaacgaaacggactacttccagccgatgttcaccagctatggaggagagcaaaacaggcccgttaagttcaaattcgtcatcgggattccaaattgtggatccatgcagatgtggccaatataccactatgctggcagctctgataagctagtgttactggatgatgggaggctaaggcattacaccaatgccgaaaacgaagcagaggagcgtcatggaatacaatcggattatgaggaggatattgccggcagtctggaaccgctataccatgactacgataagggattgtattgcattgacaaggccacttccagtactggagaggaaaatgtgctattcgccaacatttgcttggcccgcaaggagatcaagtggagtgactcaaactttctgctccgcaaaatcttaaacccaattttccatggcatctcgcttgttatcctgctggtcatcgccatcatctattttatacttcctactctcagcagagatctggttggtaacattgtgacaacgatagccatgtgccttatggtaagccaggcagcagaccttgtaagaattttcaccgagctgaccagccatgtgagcttcattgtggcggacattatcctgtgcttcagcctcttggcagccttcttctggctgaacagtttcggtttttacatctggaagacctttcgttcgaggaacgtcttcctgcgagtcacggacggcaagaagtactgctattattcagcgtatgcttggggatgcacagcaacgatggctgcactggctgtcttcgcacatttcttcctcgacgccgaatcctacaaacaggagcacatggtgggcgagcaagagacgatcggctggctaggcatatgcatattctttgctccaattgcttgtaccattttggtaaacatattcttctatgtgaccaccaggaagttgattaaccgcaggacggtatacggccgcattgcgcacaaattgaaagccaattttatcatgttctcgctgatgctgttagtaatgtctatagcctggctattcctcataatgtcctggttgcagatggaaggcctgctttacgcccacatcgtagttaacgccctgcagacgccgctgttgctatacatatgcgtgctgcgccagcgacatgtgacatttctgcttaaaaagacctgctgctacaatgagccaccgtcggcaaacgactggggcgatgagctgcattatatgaacggcaacgattactga

SEQ ID NO: 74 - protein, 497 aa, Drosophila melanogaster
MLVKTLGANFAAGQNAKKCSCCALLISLLCVLLLSLNPLPVTSHVTSAGSSTALSSDPNLVLVNKCCEKFEIHVDHECQQVNETDYFQPMFTSYGGEQNRPVKFKFVIGIPNCGSMQMWPIYHYAGSSDKLVLLDDGRLRHYTNAENEAEERHGIQSDYEEDIAGSLEPLYHDYDKGLYCIDKATSSTGEENVLFANICLARKEIKWSDSNFLLRKILNPIFHGISLVILLVIAIIYFILPTLSRDLVGNIVTTIAMCLMVSQAADLVRIFTELTSHVSFIVADIILCFSLLAAFFWLNSFGFYIWKTFRSRNVFLRVTDGKKYCYYSAYAWGCTATMAALAVFAHFFLDAESYKQEHMVGEQETIGWLGICIFFAPIACTILVNIFFYVTTRKLINRRTVYGRIAHKLKANFIMFSLMLLVMSIAWLFLIMSWLQMEGLLYAHIVVNALQTPLLLYICVLRQRHVTFLLKKTCCYNEPPSANDWGDELHYMNGNDY

SEQ ID NO: 75 - DNA, 1800 bp, Drosophila melanogaster
  CDS (1)..(1800)
atggcagtcaaaatgctgcccactaatagttccggtgtcctggcaaccgatctacaactgtttcacaatgagaaatttctcttaaatctgacacaagtgctgaacatctccgcggacaacctgaccagccttctccagggcctggagccggaggagcttttgcccacggtgaccccgatgacaccactttcactgctggccaccctaagcgtgggctacgccctcatatttatcgccggcgttttgggcaacctcatcacatgcattgtcatttcgcggaacaactttatgcacacggccaccaacttttatctgtttaacctcgctatatccgacatgattttgttatgctcaagaatgccgcaggacctctataacctctggcacccggataattatcctttcagtgacagcatctgcatattggaaagcgttctctcggaaacggcggccaatgcgacagttctaaccattaccgcgttcacagtcgaacgatatattgccatttgtcatccgttcaggcagcacacgatgtccaagttgtcacgggccgtaaagttcatatttgccatctggatagctgcccttttgctggccctgccccaagccattcagttttccgtggtgatgcagggcatgggaacatcgtgcacgatgaaaaacgacttttttgcccatgtgtttgctgtgtcgggcttcctgttctttggcggacccatgacggccatctgcgtgctctatgtcctcatcggggtgaagttgaaacggagccgactcctgcaggcgcttcccaggcgatgttacgatgtaaaccgggggataagcgcccaaacgcgagtcatccggatgctggtggcggtggccgtggccttcttcatctgctgggccccctttcacgcccagcggctgatggcggtctatggatccacctcgggcattgagtcccagtggttcaacgacgtgttcagcatcctcgactatacgtccggtgttctctacttcctctcaacttgcatcaacccgctgctctacaacatcatgagccacaagtttcgtgaggcttttaaggtaactttggctagacactttggacttggtggcaaaaatcagggaagggggcttcctcatacttacagcgctcttcgacgtaatcaaacgggttcactgcggctgcacacaacggacagcgttcgcaccacaatgacttccatggcgacgaccaccactgggctaaatggatctgccaatggcagtggcaatggaacgacaacgggtcagtcggtgcgcctgaaccgcgtgtccttggacagtgtccagatgcagggtcagaatcacagccggcaagacctcttcgataatccgcgtcgcatgctccagacgcaaatatcgcagctgtcatcggtgggcgatgcccattccctcttggaggaggatttgcagtttcccggggagccactgcagcgccagcccacgatgtgctccattgacgagctcacagatgacttggccatctcgcggtcacgcctcaaacttacgcgcatcactcgcccaccaggaggtgtgacggggggcgtggcaggaggcagcaaaacagtggccgcggggtcggggggcgtgagcggtgacgagtcgagtggcaaagtgcgcaaggcgaaagtgaaagtgctcaagagctcaagcccgttcaagggtctcaggaccaaattcaattggcgtgccagacgcaaaggcagccacaaaccgcacgaaaagggggcgacggtgaatggaggcgacactgaagagcgggccgccttttaa

SEQ ID NO: 76 - protein, 599 aa, Drosophila melanogaster
MAVKMLPTNSSGVLATDLQLFHNEKFLLNLTQVLNISADNLTSLLQGLEPEELLPTVTPMTPLSLLATLSVGYALIFIAGVLGNLITCIVISRNNFMHTATNFYLFNLAISDMILLCSRMPQDLYNLWHPDNYPFSDSICILESVLSETAANATVLTITAFTVERYIAICHPFRQHTMSKLSRAVKFIFAIWIAALLLALPQAIQFSVVMQGMGTSCTMKNDFFAHVFAVSGFLFFGGPMTAICVLYVLIGVKLKRSRLLQALPRRCYDVNRGISAQTRVIRMLVAVAVAFFICWAPFHAQRLMAVYGSTSGIESQWFNDVFSILDYTSGVLYFLSTCINPLLYNIMSHKFREAFKVTLARHFGLGGKNQGRGLPHTYSALRRNQTGSLRLHTTDSVRTTMTSMATTTTGLNGSANGSGNGTTTGQSVRLNRVSLDSVQMQGQNHSRQDLFDNPRRMLQTQISQLSSVGDAHSLLEEDLQFPGEPLQRQPTMCSIDELTDDLAISRSRLKLTRITRPPGGVTGGVAGGSKTVAAGSGGVSGDESSGKVRKAKVKVLKSSSPFKGLRTKFNWRARRKGSHKPHEKGATVNGGDTEERAAF

SEQ ID NO: 77 - DNA, 1293 bp, Drosophila melanogaster
  CDS (1)..(1293)
atgtccgctggcaatatgagccatgatcttggaccgcctcgcgatccgctggccatcgtgatacccgtaacggtagtctactccctgattttcataaccggtgtggttggcaacataagtacctgcattgtgattaagaagaaccgttcaatgcacacggccacgaattactacctcttttcgctggccatctcggatttcctgctcctgttgtcgggcgttccgcaggaggtgtcctacatctggtccaagtacccgtacgtgtttggggagtacatctgcatcggacgtggtctgttggcggagacatcggcgaatgccacggtgctaacgattacggccttcacggtggagcggtatattgccatttgccatccgtttctgggccaggccatgagtaaactcagtcgcgccattcgcatcatcgtcctggtttggattatggccatagttacggccattccgcaggctgcccaatttggaatcgagcactattcgggagtggagcaatgcggcatagtgcgggtcatagtgaagcactcattccagctgtccacgttcatattcttcctggctccgatgtctattatcctagtgttgtacctacttatcggtgtgcacctgtatcgatccactttggtggagggtcctgcctcggttgccagacggcagcagctgaagagtgtgcccagtgatacgatcctatatcgctatggtggatccggtaccgctatgagtttcaacggcggaggaagtggagcagggacagcgggcttgatgggcggctcgggggctcaacttagctcggtgagaggtcggctcaatcactatggcacccggcgagtactcaggatgctagtggccgtggtggtgtgcttcttcctctgctgggcccccttccacgcccagcgactgattgccatctacgcccctgcacggggggccaaactgcgggatcagcacgagtttgtctacacggtgatgacctatgtctccggtgtcctctactacttgtccacctgcatcaacccgctgttatataacattatgagccacaagttccgagaggcattcaaggccgttctgtttggcaagaaggtatcgatgggttcgctgaactcgcgaaacaacatcgaatcacgccgcctgaggagggcactaaccaattccagtcaaacgcagcgcttctccattgagtcggcggagcagccgaaaccgtcgataatgcagaatccgacgaacaagccgccagtcgccgctcagtacgccatgatcggtgtccaagtcaactaa

SEQ ID NO: 78 - protein, 430 aa, Drosophila melanogaster
MSAGNMSHDLGPPRDPLAIVIPVTVVYSLIFITGVVGNISTCIVIKKNRSMHTATNYYLFSLAISDFLLLLSGVPQEVSYIWSKYPYVFGEYICIGRGLLAETSANATVLTITAFTVERYIAICHPFLGQAMSKLSRAIRIIVLVWIMAIVTAIPQAAQFGIEHYSGVEQCGIVRVIVKHSFQLSTFIFFLAPMSIILVLYLLIGVHLYRSTLVEGPASVARRQQLKSVPSDTILYRYGGSGTAMSFNGGGSGAGTAGLMGGSGAQLSSVRGRLNHYGTRRVLRMLVAVVVCFFLCWAPFHAQRLIAIYAPARGAKLRDQHEFVYTVMTYVSGVLYYLSTCINPLLYNIMSHKFREAFKAVLFGKKVSMGSLNSRNNIESRRLRRALTNSSQTQRFSIESAEQPKPSIMQNPTNKPPVAAQYAMIGVQVN

SEQ ID NO: 79 - DNA, 1491 bp, Drosophila melanogaster
  CDS (1)..(1491)
atgtacacaccacacccatttggtttcctaatcatcctcgttccaatgacaaatgcaatgcgggcgattgctgcaatcgcagcaggagtgggttcagtggccgccacggtcgcaaccagcaccaccagttccatcagcagcagcaccaccatcatcaacaccagtagcgccactaccatcggcgggaatcacaccagtgggagcaccggattctccacgaattccacgctgctggacgccgatcatctgccgctgcagctcacgaccgccaaggtggacctggacattgaaatcgacatccaactgctgacaaatggctacgatggcacaacgttgacatcgttctacaatgagagcagctggacaaatgcgtctgaaatggatacaatagttggcatcttcctatcggtgctgatattcctttcggtggccggaaacatcctggtgtgcctggccatctacacggagcgcagcctgcgccggatcggcaatctgttcctggcctcgttagcgattgcggatctcttcgtggcctcgctggtgatgacctttgccggtgtcaacgatttgctgggatattggatctttggagcgcaattttgtgatacttgggtggcctttgatgtcatgtgctcgacggcgtcaattctgaacctgtgcgccatctcgatggaccgctacattcacatcaaggatccgctcagatacggccgttgggtgacacgacgcgtggctgtcatcaccatcgccgccatttggctgctggccgcgttcgtctcctttgtgcccatctcgttgggcatccatcggcccgaccagccgctgattttcgaggacaatggcaaaaagtatccaacatgcgctctggacctcacgcccacctacgccgtcgtgtccagctgtatcagtttctacttcccctgcgtggtcatgattggcatctactgtcggctatactgctatgcccagaagcacgtgaagtccatcaaggcggtaactcgaccaggtgaggtggccgagaagcagcggtacaagagcatccggcgcccgaagaaccagcccaagaagttcaaggtgcgcaatctgcacacccacagttcgccgtatcacgtatccgaccacaaggcggccgtcacggtgggcgtgatcatgggcgtttttctcatctgctgggtgcccttcttctgcgtcaacatcacggccgccttctgcaagacctgcatcggcggacagaccttcaagatcctcacctggctgggctactcgaactcggccttcaatccgatcatctattcgatcttcaacaaggagtttcgcgacgccttcaagcgcatcctgaccatgcgcaatccgtggtgttgtgcccaggatgtgggcaacattcatccgcggaacagcgatcgcttcatcacggactatgccgccaagaatgtggtggtgatgaactcgggccgctcgagcgccgaactggagcaggtgtctgcgatttga

SEQ ID NO: 80 - protein, 496 aa, Drosophila melanogaster
MYTPHPFGFLIILVPMTNAMRAIAAIAAGVGSVAATVATSTTSSISSSTTIINTSSATTIGGNHTSGSTGFSTNSTLLDADHLPLQLTTAKVDLDIEIDIQLLTNGYDGTTLTSFYNESSWTNASEMDTIVGIFLSVLIFLSVAGNILVCLAIYTERSLRRIGNLFLASLAIADLFVASLVMTFAGVNDLLGYWIFGAQFCDTWVAFDVMCSTASILNLCAISMDRYIHIKDPLRYGRWVTRRVAVITIAAIWLLAAFVSFVPISLGIHRPDQPLIFEDNGKKYPTCALDLTPTYAVVSSCISFYFPCVVMIGIYCRLYCYAQKHVKSIKAVTRPGEVAEKQRYKSIRRPKNQPKKFKVRNLHTHSSPYHVSDHKAAVTVGVIMGVFLICWVPFFCVNITAAFCKTCIGGQTFKILTWLGYSNSAFNPIIYSIFNKEFRDAFKRILTMRNPWCCAQDVGNIHPRNSDRFITDYAAKNVVVMNSGRSSAELEQVSAI

SEQ ID NO: 81 - DNA, 1756 bp, Drosophila melanogaster
  CDS (1)..(1755)
atggcggcgttggaacatccggatgccatgctgccatactccaaattgttgtcaacagccctcactgtggccagtggtaactcgaactcctccgatggcactttgctgctcatccagaccagtgcggcaccaggtggcgatgtgatggccaccggagccggagccggaaagttgggtgtgccctcgatgaactcgtacctggtgagcatggcgtggcccaagtcgctggcagtggccgtctttctggtcatcatcctggtcaccgtggttggcaacacactcgtcatcctcgccgttctgaccacacgccgcctgcgcaccgtaaccaactgtttcgtgatgaacttggccatcaccgactggctggtcggcacctgcgtgatgcctccatcggtggtgctctacataacaggcacttggcgctttggctggatactgtgcgacatttggatctcgctggacatcctgctctgcagcggctccatcctcagcctgtgcgccatcagtctggacaggtatctcgccgtcacacaaccactgacgtactccaagaagcgccgatccaagcgactggccctcctcatgattctcgtcgtgtggataactgccctgtcaatcacatgtccaccctatttgggctggtacgaggtcggtcggcaccaggcggagttcgtggactgccgctacaaccaaaacaagggctacgtggtcttctcggcgatgggatcgttcttcattcccctcaccgtgatgctctacgtttacgtgaagattggttatgtcctcacgtcacggcgacagcgcattgtgcgcgatgcgtactcggagcgcacggcagactacgatgtggatggggacaacttcatctcggagtcggagcactatcattgcacgccaaccaagtggctgccgaacaggaagtcccgctggaggttcaactccctgcacgacccaccacccagcgccgccacgaatgcagcagcgaagggacaccagtcgtccgtcaagtgctccaagtgctccaagtgctcctctgccactggaactgctggagctggagctggagctggtgtggtagacaaaacgctgacgttcaaacatcagcccaccttttacgagctggtcgaggtgtcgcgtctctcgtcgctcattcactgctcggcaattagctgcaagtatggaggaccctgcatgcactccacgccctcgggcatgcactacgttggcacggaggcctccttctcggacacctgcctgggtggcaatgtgagcaacaacaccgccaccaccaacaacaccgtcgcactggaaaccaacgagaaactggaggcggaggccaagcaaaagcaacagcagcaacgatcctccttcgaccaccatcacccgcatgcacaccatcatggctcccatggccagcagagccatcacaatcatcaccatcgcatgccgatgcgagtttcgaccacgaaacgtgatagcaagaccgccaagaccctgactattgtgatgggcggcctaattgcttgctggctgcccttcttcgtctattatctgctgatacccttcctgccgcgacccgccgtcctcgaggacctcatgttcggcttcacctggattggctgggtcaactgcgccatcaacccgttcatctacgccttctacaatccggactttcgcactgccttctggcggctcacctgtcgccccatttgcaagcagaagcgtccgcccaaccacctggccatgttccgtggct

SEQ ID NO: 82 - protein, 585 aa, Drosophila melanogaster
MAALEHPDAMLPYSKLLSTALTVASGNSNSSDGTLLLIQTSAAPGGDVMATGAGAGKLGVPSMNSYLVSMAWPKSLAVAVFLVIILVTVVGNTLVILAVLTTRRLRTVTNCFVMNLAITDWLVGTCVMPPSVVLYITGTWRFGWILCDIWISLDILLCSGSILSLCAISLDRYLAVTQPLTYSKKRRSKRLALLMILVVWITALSITCPPYLGWYEVGRHQAEFVDCRYNQNKGYVVFSAMGSFFIPLTVMLYVYVKIGYVLTSRRQRIVRDAYSERTADYDVDGDNFISESEHYHCTPTKWLPNRKSRWRFNSLHDPPPSAATNAAAKGHQSSVKCSKCSKCSSATGTAGAGAGAGVVDKTLTFKHQPTFYELVEVSRLSSLIHCSAISCKYGGPCMHSTPSGMHYVGTEASFSDTCLGGNVSNNTATTNNTVALETNEKLEAEAKQKQQQQRSSFDHHHPHAHHHGSHGQQSHHNHHHRMPMRVSTTKRDSKTAKTLTIVMGGLIACWLPFFVYYLLIPFLPRPAVLEDLMFGFTWIGWVNCAINPFIYAFYNPDFRTAFWRLTCRPICKQKRPPNHLAMFRG

SEQ ID NO: 83 - DNA, 2298 bp, Drosophila melanogaster
  CDS (1)..(2298)
atggtctacggcaggagcatcgccgtaggcttctgtctgatgaccgtcgtccttctgctggccgccgtgatattctacttgagtttgggaccctgccccgcggccagcttcgcctgcgacaacggcacgctgtgcgttccaaggcgccagatgtgcgacagtcggaacgattgcgccgacagcagcgacgagaatccggtggagtgcggtctcctctacggcagcaaggagattgccgacaagattgtccgtaatgcgattgaaaagaagcaacagcgcctaatctccgccgtttcaaatgcgagcggtgcggattcaacgacgtcgatggtgccaaggaatcagagcctaactttaaacatgacttgtgatatcgtcacatatccgaaggcctgtcagtgcggccagggaacaatcctctactgcggtcgctatgccaaattgcggcgatttccgcgtctcagttcggaggtcaccaatctgatcatcatccgcaacaatctgaccctgcgcgacaatatctttgccaatttcacgcgtctgcagaagctgacgcttaagtacaacaacatatcacgtgtcccgctgggcagcttcagtggcctctttcacctggaacgcctggagctgagccacaacaacgttagccacctgccgcacggtgtcttcctggggctgcacagcctccagtggctgttcttggtcaataaccatctgcaccacctgcccgtggagcaactgcgattctttagacgattggagtggctggtgctgagcaggaatcgtctcacactgcgaaatgtgcagctgccgaaaatcccgacgctctacgaagtttatttggatttcaatcgaatcgaatacattggcgaggaaactttttcccaattggataatttacatttgctggatctgcagcacaacctcataacgcacatccatggacgagcctttgcgaatctaacaaatatgcgagatatccgccttgtcggtaatcccattaaggagttatctggcgaaacatttttgcacaacactcgactggaggcactttcgttggccctaatgccgattcacatcagcagcagtttaatggagccactgaatatatcgtttttgaatctcacgggaattcggtatgatcacatcgacttcgaggccatcaattcaatgcgcaacctgacgtacatcatctacgatcgattcttctactgctcaatgacgccgcgggtgagaatgtgcaagccgtccaccgatggagtcagctcctttcaagatcttctgagcaaaccagtgttacgttactccgcctgggtgatggccacgttgacaatagctggaaatgtgctagtcctatggggacgctttatctaccgcgatgagaatgtggctgtgacaatggtgattcggaatctggctctggctgatatgctgatgggcttctatttggtcaccattggagtgcaggactatcgctaccgcaacgagtattacaaggttgtgctggactggataacctcgtggcagtgcacactgattggaacgctggccgtgagctcctcggaggtttcgatgcttatcctggcttttatgtcgctggagcggtttctcttgatcgccgatccctttcgcggccatcgcagcattggcaatcgggtgatgtggctggctttgatttgcatttggattacgggcgtgggcttggctgtggcaccggtgctcctgtggcggaccagtaccctaccctactacggatcctattccggaacctgctttccattgcacatccacgaggccttcccgatgggctggctttactcggctttcgtgttcctgggcgtcaatctgctgctgctggtgatgattgcgatgctctacacggcactccttatttcgatatggcgaacgaggagcgccactccgctcactctgttggattgcgaattcgctgtgcgattctttttcatcgtgctgaccgacttcctgtgctgggtgcccatcatcgttatgaagatctgggtttttttcaactacaatatctccgatgacatctacgcctggttggtggtctttgtgctgccacttaactcggcggttaatcctctcttgtacaccttcaccacgcccaagtaccgaaatcaaatcttccttcgcggctggaagaagataacttctagaaagcgagcggaggctggcaatggaaatgtggccatcacaacgacgggcacggcaactggatcctctcagcatccggatgacttcacgatctttgccaaagccgcgatgagatgccattag

SEQ ID NO: 84 - protein, 765 aa, Drosophila melanogaster
MVYGRSIAVGFCLMTVVLLLAAVIFYLSLGPCPAASFACDNGTLCVPRRQMCDSRNDCADSSDENPVECGLLYGSKEIADKIVRNAIEKKQQRLISAVSNASGADSTTSMVPRNQSLTLNMTCDIVTYPKACQCGQGTILYCGRYAKLRRFPRLSSEVTNLIIIRNNLTLRDNIFANFTRLQKLTLKYNNISRVPLGSFSGLFHLERLELSHNNVSHLPHGVFLGLHSLQWLFLVNNHLHHLPVEQLRFFRRLEWLVLSRNRLTLRNVQLPKIPTLYEVYLDFNRIEYIGEETFSQLDNLHLLDLQHNLITHIHGRAFANLTNMRDIRLVGNPIKELSGETFLHNTRLEALSLALMPIHISSSLMEPLNISFLNLTGIRYDHIDFEAINSMRNLTYIIYDRFFYCSMTPRVRMCKPSTDGVSSFQDLLSKPVLRYSAWVMATLTIAGNVLVLWGRFIYRDENVAVTMVIRNLALADMLMGFYLVTIGVQDYRYRNEYYKVVLDWITSWQCTLIGTLAVSSSEVSMLILAFMSLERFLLIADPFRGHRSIGNRVMWLALICIWITGVGLAVAPVLLWRTSTLPYYGSYSGTCFPLHIHEAFPMGWLYSAFVFLGVNLLLLVMIAMLYTALLISIWRTRSATPLTLLDCEFAVRFFFIVLTDFLCWVPIIVMKIWVFFNYNISDDIYAWLVVFVLPLNSAVNPLLYTFTTPKYRNQIFLRGWKKITSRKRAEAGNGNVAITTTGTATGSSQHPDDFTIFAKAAMRCH

SEQ ID NO: 85 - DNA, 2397 bp, Drosophila melanogaster
  CDS (1)..(2397)
atggccatagacctcctgatcctggccctgctgctcgtctcgttcctgatcaacctgctggcgctgtgtgccttttggataacgcctggcttgaggaccaccgccaatcgctttacgatcaacctgctggccatcaatctcattggttgctgcatcttggcccccactttgttcctgggactgccgggaaagtctgcggaggcatccacttccaacgccgagaccctggagttcttctcgaagccgggaaaccatcaggtgatacttcgtcgcaatggccagctggtggaacaggacggcgtggtggtgcgaaggaacatcagcgaaaacggcgatacggtggagaccttcttcaagtgcaatgccacctactgtcgcgagttgaccatcgatgagcgcggagatggtggctttgtcatcacggaaaccgagacacacgaagagaatctctcggcctttgagagcttacccacggaggctcccattttgccgcccgtccaactgagatgttggtccatagacatgactgctgcgctgggagctctggcagtactgctcgtggtgggggacacctggtgtgccgttacggatcccctgcgctaccacagtcgcatttcgggcgtgaaaacctggatcttcatagcactcacctgggtggtgggcatactctttggagccctttccgccttccgagttttggactttgaggcggacgccctgttcagcagacaacgccgcctggcagtcacgtacttcaacatcagcagcaccaatagtattttcggagtggtgtacgccagtgtctacttcatcgtgatcatcctcctgcccttcggcttcgtgtgcggaatgtactggaggatattcagtgaggcgcgcggaaatgggctgcgcatgcgccagaatggctcttcgccgctgctgcagagcgccttgaatctgacggctggccagcaggcggctcaagccaaccagttctccaatagcttgtgtgttcatcggcattccatatcctcggccagttcgcatggcggcaacagcagcttgggcttgggcggtctgcaaatgcaaattgatcagcgccaacagccgaggagttcgcccagttgtctccgtcgggactcggccgcgaaagtacttttgcccaccatctcggatgatggtggctcagatgcggaaagtggagccggagttcaactgatgcccgtacaggagcactcactgtcagatagaaatcagaacattatgcttactctgcaaacagccagtggtgaaataaagaggaactactccgccagacagctgcccctgttgggcacttcttcgcaggatctgagggagactaatcgtctgcagggcatacgccaggtgcacagttcgcccaatctccacaagtacacggaactgcgccaggactcgctcagtgaggagtgtggttctccgcatcttttgggtcacgcccagcggcagcagcagcagcaattgcacctgcaacatcagcagcaacagcatcatcaccaccagcaacatcatccgcacttcagttcgccgcgccaccagcaacacggccacgccctccagatacccgccattcatgcctcccccaaggctctgagttacatgagctccttgcgacaccgtttgagcaacgccagttcgctattcaaataccgtgaggagtcgagagcagcccgcatcagcatcctggtggtggtgatgtttgtggtctcgtacctgcccttcggactgctggtactcctgcaatcgcgactgtcggctgctaactttggcggatcctcccagctggccatcttcatgatcctgctggccaatctcagttcgccattcatcttcgcctacaggaacaagagggtgaggcgaggagtcaagcggctgtttggtctggattcgtcgtcgggcctgcagcgcaactgcagcagcagtgtaaagaccaatggcaccgcaggtcctgctgcaagtggtgcacaattgcagcgcaacagcagcaagttgtcgcagtacagcagcaacagctgcaagtatctcaccccccagagttccctggtcagtcaagtgccggtgcatacgaccttgacgttaaggcccaacagcagctgcagcaccatcatcaatttcggtggcgccaggggctcagcggactccgatgagcagccaccggcaacaccaccacctactgtggcagttgctccaccgcccacacgaccgcagcgccccaagctgcagaggggcatcaccatcgttgagcacatagctataacaccaaccatgccccaaaagttccagaatcggcgcgccaggctcttcgacatgttcttccgcagctccaagaaactgcaggcgggctgccagagccagagtttgcccactgaggtctaa

SEQ ID NO: 86 - protein, 798 aa, Drosophila melanogaster
MAIDLLILALLLVSFLINLLALCAFWITPGLRTTANRFTINLLAINLIGCCILAPTLFLGLPGKSAEASTSNAETLEFFSKPGNHQVILRRNGQLVEQDGVVVRRNISENGDTVETFFKCNATYCRELTIDERGDGGFVITETETHEENLSAFESLPTEAPILPPVQLRCWSIDMTAALGALAVLLVVGDTWCAVTDPLRYHSRISGVKTWIFIALTWVVGILFGALSAFRVLDFEADALFSRQRRLAVTYFNISSTNSIFGVVYASVYFIVIILLPFGFVCGMYWRIFSEARGNGLRMRQNGSSPLLQSALNLTAGQQAAQANQFSNSLCVHRHSISSASSHGGNSSLGLGGLQMQIDQRQQPRSSPSCLRRDSAAKVLLPTISDDGGSDAESGAGVQLMPVQEHSLSDRNQNIMLTLQTASGEIKRNYSARQLPLLGTSSQDLRETNRLQGIRQVHSSPNLHKYTELRQDSLSEECGSPHLLGHAQRQQQQQLHLQHQQQQHHHHQQHHPHFSSPRHQQHGHALQIPAIHASPKALSYMSSLRHRLSNASSLFKYREESRAARISILVVVMFVVSYLPFGLLVLLQSRLSAANFGGSSQLAIFMILLANLSSPFIFAYRNKRVRRGVKRLFGLDSSSGLQRNCSSSVKTNGTAGPAASGAQLQRNSSKLSQYSSNSCKYLTPQSSLVSQVPVHTTLTLRPNSSCSTIINFGGARGSADSDEQPPATPPPTVAVAPPPTRPQRPKLQRGITIVEHIAITPTMPQKFQNRRARLFDMFFRSSKKLQAGCQSQSLPTEV

SEQ ID NO: 87 - DNA, 1350 bp, Drosophila melanogaster
  CDS (1)..(1350)
atgtactacatagctcaccagcagccgatgctgcggaacgaggatgataactaccaggaggggtacttcatcaggccggaccctgcatccttactttacaataccaccgcactgccagcggacgatgaagggtccaactatggatatggctccaccacaacgctcagtggcctccagttcgagacctataatatcactgtgatgatgaactttagctgtgacgactatgaccttctatcggaggacatgtggtctggtgcctactttaagatcatcgtctacatgctctacattcccatctttatcttcgccctgatcggcaacggaacggtctgctatatcgtctattccacacctcgcatgcgcacggtcaccaattactttatagccagcttggccatcggcgacatcctgatgtccttcttctgcgttccgtcgtccttcatctcgctgttcatcctgaactactggccttttggcctggccctctgtcactttgtgaactactcgcaggcggtctcagttctggtcagcgcctatactttggtggcaattagcattgaccgctacatagccattatgtggccattaaagccacgcatcacaaaacgctatgccaccttcatcatcgccggcgtttggtttattgcacttgccaccgcacttcccatacccatcgtctctggactcgacatcccaatgtcgccgtggcacacgaaatgcgagaagtacatttgccgcgagatgtggccgtcgcggacgcaggagtactactacaccctgtccctcttcgcgctgcagttcgtcgtgccgctgggcgtgctcatcttcacctacgcccggatcaccattcgcgtctgggcgaaacgaccgccaggcgaggcggaaaccaaccgcgaccagcggatggcacgctccaaacggaagatggtcaaaatgatgctgacggttgtgattgtgttcacctgctgttggctgcccttcaatattttgcagcttttactgaacgacgaggagttcgcccactgggatcctctgccgtatgtgtggttcgcgtttcactggctggccatgtcgcactgctgctacaatccgatcatctactgctacatgaacgcccgtttcaggagcggattcgtccagctgatgcaccgtatgcccggcctgcgtcgctggtgctgcctgcggagcgtcggtgatcgcatgaacgcaacttccggaacgggtccagcacttcctctcaatcgaatgaacacatccaccacctacatcagcgctcgtcgaaagccacgagcgacatctttgcgagcgaacccattatcgtgcggcgagacgtcaccactgcggtag

SEQ ID NO: 88 - protein, 449 aa, Drosophila melanogaster
MYYIAHQQPMLRNEDDNYQEGYFIRPDPASLLYNTTALPADDEGSNYGYGSTTTLSGLQFETYNITVMMNFSCDDYDLLSEDMWSGAYFKIIVYMLYIPIFIFALIGNGTVCYIVYSTPRMRTVTNYFIASLAIGDILMSFFCVPSSFISLFILNYWPFGLALCHFVNYSQAVSVLVSAYTLVAISIDRYIAIMWPLKPRITKRYATFIIAGVWFIALATALPIPIVSGLDIPMSPWHTKCEKYICREMWPSRTQEYYYTLSLFALQFVVPLGVLIFTYARITIRVWAKRPPGEAETNRDQRMARSKRKMVKMMLTVVIVFTCCWLPFNILQLLLNDEEFAHWDPLPYVWFAFHWLAMSHCCYNPIIYCYMNARFRSGFVQLMHRMPGLRRWCCLRSVGDRMNATSGTGPALPLNRMNTSTTYISARRKPRATSLRANPLSCGETSPLR

SEQ ID NO: 89 - DNA, 1074 bp, Drosophila melanogaster
  CDS (1)..(1074)
atggagaacaccacaatgctggctaatattagcctaaatgcaaccagaaatgaggagaatatcacctcattcttcaccgacgaagagtggctggccatcaatggcactttgccgtggatagtgggattcttcttcggcgtcatcgccatcacgggattcttcggcaacctgctggtcatcctggtggtggtcttcaacaacaacatgcgctccaccaccaacctgatgattgtcaatctggctgccgctgatctgatgttcgtaatcctctgcattcccttcacggccaccgattacatggtgtactactggccatatggaaggttctggtgccgcagtgtccagtacctgattgtggtgaccgccttcgcctccatctacacgctggtgctaatgtccatcgatcggttcctggcggtggttcatcccattcgctcgcggatgatgaggacggagaacattaccctgattgccatcgtgactctgtggatcgtggtgctggtcgtttcggtgccagtggccttcacccacgacgtggtggtggattacgatgcaaagaagaacatcacctacggcatgtgcaccttcacgacgaacgacttccttggtccgcgcacctaccaggtcaccttcttcatcagctcctacctgctgcccctgatgatcatcagcggtctctacatgcgcatgatcatgcggctctggcgccagggaaccggcgtccgcatgtccaaggagtcgcagcgcggtcgcaagcgggtcacccgactcgtcgtcgtggtggtcatcgccttcgcctcgctctggctgcctgtccagctcatcctgctgctcaagtcactggatgtcatcgagacgaacaccctcaccaagctagtcatccaggtcaccgcccagactctggcctacagcagctcgtgtatcaatccgctgctctacgccttcctctccgagaatttccggaaggccttctacaaggccgttaactgctcctctcgataccagaactacacatctgatttgccgccgccgcgcaagacgtcctgtgccaggacctccaccactggactctaa

SEQ ID NO: 90 - protein, 357 aa, Drosophila melanogaster
MENTTMLANISLNATRNEENITSFFTDEEWLAINGTLPWIVGFFFGVIAITGFFGNLLVILVVVFNNNMRSTTNLMIVNLAAADLMFVILCIPFTATDYMVYYWPYGRFWCRSVQYLIVVTAFASIYTLVLMSIDRFLAVVHPIRSRMMRTENITLIAIVTLWIVVLVVSVPVAFTHDVVVDYDAKKNITYGMCTFTTNDFLGPRTYQVTFFISSYLLPLMIISGLYMRMIMRLWRQGTGVRMSKESQRGRKRVTRLVVVVVIAFASLWLPVQLILLLKSLDVIETNTLTKLVIQVTAQTLAYSSSCINPLLYAFLSENFRKAFYKAVNCSSRYQNYTSDLPPPRKTSCARTSTTGL

SEQ ID NO: 91 - DNA, 1560 bp, Drosophila melanogaster
  CDS (1)..(1560)
atggagaatcgcagtgacttcgaggcggatgactacggcgacatcagttggagcaattggagcaactggagcacccccgccggcgtccttttctcggccatgagcagcgtgctctcggccagcaaccatacgcccctgccggactttggccaggagctcgccctatccaccagctccttcaatcacagccagaccctatccaccgaccagcccgccgtcggggacgtggaagacgcggccgaggatgcggcggcgtccatggagacgggctcgtttgcatttgtggtcccgtggtggcgtcaggtgctctggagcatcctcttcggcggcatggtcattgtggcgacgggcggtaacctgattgttgtctggatcgtgatgacgaccaagcggatgcggacggtaaccaactatttcatagtgaatctctccatcgcggacgccatggtgtccagcctgaacgtcaccttcaactactactacatgctggatagcgactggcccttcggcgagttctactgcaagttgtcccagttcatcgcgatgctaagcatctgcgcctcagtgttcaccctaatggccatctccatcgacagatacgtggccatcatccggccactgcagccgcggatgagcaagcggtgcaacctggccatcgcggcggtcatctggctggcctccacgctcatctcctgccccatgatgatcatctaccgcacggaggaggtgccggtccgcgggctcagcaaccgcacggtctgctacccggagtggcccgatgggcccaccaatcactccacgatggagtccctctacaacatcctcatcatcatcctaacctacttcctgcccatcgtctccatgacggtcacctactcgcgcgtgggcatcgagctctggggatccaagaccatcggcgagtgcacgccccgccaggtggaaaacgtgcggagtaagcgaagggtggtgaagatgatgattgtggtcgtcctgatattcgccatctgctggctgccgttccacagctacttcataatcacatcctgctacccggccatcacggaggcgcccttcatccaggaactctacctggccatctactggctggccatgagcaactccatgtacaatcccattatatactgctggatgaattcgcgctttcgctatggtttcaagatggtcttccgctggtgcctgtttgtgcgcgtgggcactgaaccctttagtcggcgggagaacctgacatcccggtactcctgctccggttccccggatcacaatcgcatcaagcgcaatgatacccagaaatcgatactttatacctgtcccagctcacccaagtcgcatcgaatttcgcacagcggaacaggtcgcagtgcgacgctgcggaacagtctgccggcggagtcactgtcgtccggcggatctggtggtggagggcacaggaaacggttgtcctaccagcaggaaatgcagcagcgttggtcaggacccaatagtgccaccgcagtgaccaattccagcagtacggccaacaccacccaactgctctcctga

SEQ ID NO: 92 - protein, 519 aa, Drosophila melanogaster
MENRSDFEADDYGDISWSNWSNWSTPAGVLFSAMSSVLSASNHTPLPDFGQELALSTSSFNHSQTLSTDQPAVGDVEDAAEDAAASMETGSFAFVVPWWRQVLWSILFGGMVIVATGGNLIVVWIVMTTKRMRTVTNYFIVNLSIADAMVSSLNVTFNYYYMLDSDWPFGEFYCKLSQFIAMLSICASVFTLMAISIDRYVAIIRPLQPRMSKRCNLAIAAVIWLASTLISCPMMIIYRTEEVPVRGLSNRTVCYPEWPDGPTNHSTMESLYNILIIILTYFLPIVSMTVTYSRVGIELWGSKTIGECTPRQVENVRSKRRVVKMMIVVVLIFAICWLPFHSYFIITSCYPAITEAPFIQELYLAIYWLAMSNSMYNPIIYCWMNSRFRYGFKMVFRWCLFVRVGTEPFSRRENLTSRYSCSGSPDHNRIKRNDTQKSILYTCPSSPKSHRISHSGTGRSATLRNSLPAESLSSGGSGGGGHRKRLSYQQEMQQRWSGPNSATAVTNSSSTANTTQLLS

SEQ ID NO: 93 - DNA, 1695 bp, Drosophila melanogaster
  CDS (1)..(1695)
atggctttatctggacaggactggcggcgccatcagagccaccgccagcacagaaaccacagaacccagggaaaccaccagaaactgatctccaccgccacgctgactctgttcgtgctctttctgagcagctggatagcctatgcggcgggcaaggccaccgttcccgctccgctcgtggaaggcgagacggagtcggccacttcgcaggactttaatagcagtagcgccttcctgggggccatagcctcggcctcatcgacgggatcgggatcgggctcgggctcgggctcgggatcgggatcgggatcaggatcctatggcctggcctcgatgaacagcagccccattgccatagtctcgtatcaaggcatcaccagcagcaatttgggcgacagcaatacgactttggtgccgctatcggacactcctttgctcctggaggaatttgcagccggcgagtttgtactgcccccgttgacgtccatattcgtgagcatcgtccttctcatcgtgatcctaggcactgtagtgggcaatgtcctggtctgcatagccgtttgcatggtgcggaaattgaggagaccctgcaattaccttttggtgtccttggctctttcggatctctgtgtggctcttctggtgatgcccatggccttgctttatgaagtgctggagaagtggaactttggaccgctgctctgcgacatctgggtgtccttcgatgtgctgtgctgcacggcctcgatcctgaatctgtgtgccatatccgtggatcgatacctggccatcacgaagcccctggagtacggcgtgaagaggactcctcggcgaatgatgctgtgcgtgggcatcgtctggctggccgccgcctgcatctcattgcctcctctgctgatcctgggcaacgagcacgaggacgaggagggccagcctatctgcacggtgtgccagaacttcgcatatcagatctacgccaccctgggctcattttacataccactctcggtgatgctgtttgtgtactaccagatcttcagggcggcgaggcggattgtcctggaagagaaacgcgcccagacgcatttgcaacaggcgctcaatggcacaggatcgccatcggccccgcaggctccgcccttgggccacacggagctggccagctcgggaaatggccagaggcacagcagcgtgggcaacacttcgctcacctactccacctgtgggggtctgagcagcggaggaggcgcactggctgggcacggcagtgggggtggcgttagtggttcgaccggactcctgggctctccgcaccacaagaagctgcggtttcaactggccaaagagaagaaggcctccaccactctgggcatcatcatgtcggcctttaccgtctgctggctgccattctttatcctggccctaattcgtcctttcgagacaatgcacgtaccggcatcgctctcgtctctattcctctggctgggctatgccaactccctgctgaaccctattatctacgccactctgaacagggatttccgcaaacccttccaggagatcctctacttccgctgctccagcctgaacaccatgatgcgggagaactactaccaggatcagtatggcgagcctccctcgcagcgggtgatgctgggcgatgagaggcacggggcgagggagagctttctctag

SEQ ID NO: 94 - protein, 564 aa, Drosophila melanogaster
MALSGQDWRRHQSHRQHRNHRTQGNHQKLISTATLTLFVLFLSSWIAYAAGKATVPAPLVEGETESATSQDFNSSSAFLGAIASASSTGSGSGSGSGSGSGSGSGSYGLASMNSSPIAIVSYQGITSSNLGDSNTTLVPLSDTPLLLEEFAAGEFVLPPLTSIFVSIVLLIVILGTVVGNVLVCIAVCMVRKLRRPCNYLLVSLALSDLCVALLVMPMALLYEVLEKWNFGPLLCDIWVSFDVLCCTASILNLCAISVDRYLAITKPLEYGVKRTPRRMMLCVGIVWLAAACISLPPLLILGNEHEDEEGQPICTVCQNFAYQIYATLGSFYIPLSVMLFVYYQIFRAARRIVLEEKRAQTHLQQALNGTGSPSAPQAPPLGHTELASSGNGQRHSSVGNTSLTYSTCGGLSSGGGALAGHGSGGGVSGSTGLLGSPHHKKLRFQLAKEKKASTTLGIIMSAFTVCWLPFFILALIRPFETMHVPASLSSLFLWLGYANSLLNPIIYATLNRDFRKPFQEILYFRCSSLNTMMRENYYQDQYGEPPSQRVMLGDERHGARESFL

SEQ ID NO: 95 - DNA, 2409 bp, Drosophila melanogaster
  CDS (1)..(2409)
atgaatttcaactggtgtgctgggctctttgtggtcttggccttggtttcgccgatttattccgcctgcccaaaggaaaatcaagtgtgcttgagaaacggaacgtttcagtactgtgatggagaggaacgtaattcatcggacgaacttatgcaaacacatctggtttactgtacgtccatgttctgcgagccggaggagtttcagcacgactacataacgcgtaaccacgatcaaacacctcaccagaacaagtggaaacgggctagaatcggcgaacgtgccgccctgcacgatgtttgccttctgcgaaacggaatgccggtcaccagggagtgcagagtgaaggacaaccgagccaactgggagtccaccgaacactgggatcccgtggtgtgtttgaggcgattcagggagcacacgatcagcggtgacttgaatagcctgcatgacgacgttctcgagggcaggaggcgcaccaatgacacccaggggcgtcgtgagatgactggcataatgaggaacatgttccgacagagaggtgggaatcttctacccgccgatgttcacatgaccggacaaatgttcggcgccctgatgcagcaggacaaggatgccacggtcagtgtggacttggtcagtgtctgcaaggagataatgtcctgcgacagtaaggttcttagattatcagctcagctcaacgctaccaattccctgctcagccagttcgaaagctacatggatgctcttccggagcaactggttcccaaggacagatgcggcaaggtggtggccaagccgaccagtgatgaagcagaaacggccactactggagtggaaacgtacaacttctcagatatcggtgtccaagctctgattaccggcaatatcagcgtgttcttcgccaaccccgaatgcgatcgcataactggattagctatattctctgcgccaggggatcaacgaaagacttccgccagtggcttctggtaccgcttcattcgattctccgaagacttggctaaggtcaaggaggaatctaatctggagacagctgcatttttgccggagaatctctggcggcaagtgaaaagcaggggagcaacctatctcatctttaaagtctatgcccacgatgctctgttcgtggaaacctcattgcaacgcactcgtaagccgcgcagcaaagtaatctccatttcaataccaggactgagaagcaattatctctctctgccactgccctttcttctgcgtaatgaaaatcttcgcaatccggattcaaaggcctttagcattgggagtggatgcggatattggaactatgaaacctggtcaactgagggagtaagcactgaaagcagttcggacctcttgaaggatgccatcatcgagtgccacactaaccacctcacacagtttgcattcctggtgggtggaagctatcgagccaacgaccttggcgaggagattctaattactccgattaatgagaaagtgctggacattatctcgatagtgggctgcagtctttcccttttgggtatactgggaatattcctcactgccgcactcttcaaaagctggcgcagtcaggcctccacgaaggtcttactgcatctttgcctggctatgtgtctccagatgatgctcttcgtgtttctcaatacagatgacgtatccgaagcgctagttgtgaatggaaacacagttcgctgtgtggctctgggcgctgccatgcagtactccattctggttctcttcagttggatgctaatcattgccttcctgcagttccagcgttacgtcacagttatcggaatcgagagaccaccacgctatatcctgaaggccgccattgtggcctggctactgcccttggtccccaccctgctggtggcccttatagatcccgattcgtacgtcccctcggctgcccaactttccacggacactggcatctgctatccatcgggctatggtctcatttttggggtggtgctccctgtgaccttgattactgtgtgcaacttggtgatattcgtgtatgttttctacagcatctcgcactctttgagccagagcatccataaaaacgaaaagaaaatggtggttaagcagatccgactctccataatgctcttctttttgctgggacttacctggatctttggaatattcgccttcatgcaggcaggtgtggctttttcatacctcttctgcatcacggccactatgcagggatttgtgatgttcatttactttgtcctcttggactccacgaaccgtcggctgtgggtgggtctgatttgccccaccaagatggagctggatgtccaaaagcgcaccactgagctccagtcgatgaccacctcatccaccaactacaacagcagatcacatcagtag

SEQ ID NO: 96 - protein, 802 aa, Drosophila melanogaster
MNFNWCAGLFVVLALVSPIYSACPKENQVCLRNGTFQYCDGEERNSSDELMQTHLVYCTSMFCEPEEFQHDYITRNHDQTPHQNKWKRARIGERAALHDVCLLRNGMPVTRECRVKDNRANWESTEHWDPVVCLRRFREHTISGDLNSLHDDVLEGRRRTNDTQGRREMTGIMRNMFRQRGGNLLPADVHMTGQMFGALMQQDKDATVSVDLVSVCKEIMSCDSKVLRLSAQLNATNSLLSQFESYMDALPEQLVPKDRCGKVVAKPTSDEAETATTGVETYNFSDIGVQALITGNISVFFANPECDRITGLAIFSAPGDQRKTSASGFWYRFIRFSEDLAKVKEESNLETAAFLPENLWRQVKSRGATYLIFKVYAHDALFVETSLQRTRKPRSKVISISIPGLRSNYLSLPLPFLLRNENLRNPDSKAFSIGSGCGYWNYETWSTEGVSTESSSDLLKDAIIECHTNHLTQFAFLVGGSYRANDLGEEILITPINEKVLDIISIVGCSLSLLGILGIFLTAALFKSWRSQASTKVLLHLCLAMCLQMMLFVFLNTDDVSEALVVNGNTVRCVALGAAMQYSILVLFSWMLIIAFLQFQRYVTVIGIERPPRYILKAAIVAWLLPLVPTLLVALIDPDSYVPSAAQLSTDTGICYPSGYGLIFGVVLPVTLITVCNLVIFVYVFYSISHSLSQSIHKNEKKMVVKQIRLSIMLFFLLGLTWIFGIFAFMQAGVAFSYLFCITATMQGFVMFIYFVLLDSTNRRLWVGLICPTKMELDVQKRTTELQSMTTSSTNYNSRSHQ

SEQ ID NO: 97 - DNA, 2495 bp, Drosophila melanogaster
  CDS (1)..(2493)
atggaaaagcacccgaatctgtcccagcggatgggtaccacttaccgtccgaggaagggtctgaagtgtctgtcattcgagttccagtgccgcctgcttctccaccatctgctgctaacgtcgctgagtggccggcattgcgtatacgccacgagtgccgtcgggggggcgctgagtgccaacaactgtcacgacatccaccacggattcgatgtctaccccaatctcacggccgtatcgctggctcaatcgacggacacgcccctgaccgcgacgatgccacggtccgcctggaagtgttgttgctggaatgcaagtaatcaagcggaggaggtggagtgccgctgcgagggcgatggactgaatcgcgtaccgcaaaccctgacgctgcccatacagcgtctaactatcgcatccgcggggctgccacgcctacgccacacggggctgaaggtctacgggtccacgttgctggatgtggccttcaccgactgcctgcagctggaactgatacaggatggcgcttttgctaatttaaccctattgcgaacaatctacatcaccaacgcacccaagctgactttcctctcgaaggacgtattccttggcatttcggacaccgtggacattatacgaatcataaatagtggcctgaccagagttcctgacttgggccacctgccacctcataatattctgcaaatgatagatctcgataacaatcaaatcactcggatagacagtaaatctataaaagtaaagactgcccaattaattttgacaaacaatgaaataagctacgttgatgactccgctttcttcggctccaagatagccaaactatcgctgaaggaaaacaaaaaactgcaaatgatgcatcccaacgcattcgatggcatcatagacataactgaactcgatctctccagcacctcgttagttggccttccttctgccggacttcagaacatcgaagcgttgtacattcagaacacccacactttaaagaccataccatccatctacaacttccggaatctgcagagggcctatctcacccactccttccactgctgcgccttccagtttccatctcggcacgatcctcagcgacacgcccagcggatgctggagattgagaaatggcggaagcagtgcaaaagtgactccggaacgcgaaaggagagatcaaccttggataaccccttcaatatgccagaagattttggttctttcggtggcaccgacgactcagcaacagatataacccccatcacttttgcttccttcgattacatggccgatgacaccatgaacaagggcacttttcacgaaaagatcatcctgaatccgggtgatgactcctcggccgaactttgcggcaattttactttcagaaaacccaatattgaatgctatcccatgcccaatgatctaaatccttgcgaggatgtaatgggctatcaatggctgcgtatttccgtctggattgtggtggctctggccgtcgcgggcaacgtggctgtgctgacagtaatactatcgattaggccggagtcgacgccggtgccgcgatttctgatgtgccacctggccttcgccgacctgtgcttgggcctctatctgctgctggtggcctgcatcgatgcgcattccatgggggagtatttcaatttcgcttacgattggcagtacgggcttggctgcaaagtagccggctttctcaccgtgttcgccagtcatttgtcggtgttcacgctgaccgtgattaccatcgagcgctggctggcaatcacgcaggccatgtacctgaaccatcgcatcaagttgcgtcctgcagcgctcatcatgctgggcggctggatttactcgatgcttatgtcctcgctgcccctgtttggcataagtaattattcgtcgacgagcatttgccttccgatggagaatcgcgatgtgtacgacaccatttacctgattgccattctgggctccaatggagtagccttctccatcatagccgtctgctatgcccagatctatttgtccttgggtcgcgagacacggcaggcccaccagaatagtccgggcgagttgagcgttgccaagaagatggcccttttggtctttacaaactttgcgtgctggtcgcctattgccttctttggactcaccgcgttggccggatacccactgattaatgttaccaagtcgaagatattgctagtcttcttctatcccttgaattcctgcgcggatccctatctgtatgccatattgacgtcccagtatcgccaggatctgttcaccttgttgtccaaattgggcctgtgccagcagagcgctctgaagtacaaggatagcctttccggccaagccaccaccagatttacaatccacggctccattcagaggcacagctcactcacgtgcaaaatgcagactgtgatgggcgctgagacgcagaaaatgctgaagaacagcgaggattatgttta

SEQ ID NO: 98 - protein, 831 aa, Drosophila melanogaster
MEKHPNLSQRMGTTYRPRKGLKCLSFEFQCRLLLHHLLLTSLSGRHCVYATSAVGGALSANNCHDIHHGFDVYPNLTAVSLAQSTDTPLTATMPRSAWKCCCWNASNQAEEVECRCEGDGLNRVPQTLTLPIQRLTIASAGLPRLRHTGLKVYGSTLLDVAFTDCLQLELIQDGAFANLTLLRTIYITNAPKLTFLSKDVFLGISDTVDIIRIINSGLTRVPDLGHLPPHNILQMIDLDNNQITRIDSKSIKVKTAQLILTNNEISYVDDSAFFGSKIAKLSLKENKKLQMMHPNAFDGIIDITELDLSSTSLVGLPSAGLQNIEALYIQNTHTLKTIPSIYNFRNLQRAYLTHSFHCCAFQFPSRHDPQRHAQRMLEIEKWRKQCKSDSGTRKERSTLDNPFNMPEDFGSFGGTDDSATDITPITFASFDYMADDTMNKGTFHEKIILNPGDDSSAELCGNFTFRKPNIECYPMPNDLNPCEDVMGYQWLRISVWIVVALAVAGNVAVLTVILSIRPESTPVPRFLMCHLAFADLCLGLYLLLVACIDAHSMGEYFNFAYDWQYGLGCKVAGFLTVFASHLSVFTLTVITIERWLAITQAMYLNHRIKLRPAALIMLGGWIYSMLMSSLPLFGISNYSSTSICLPMENRDVYDTIYLIAILGSNGVAFSIIAVCYAQIYLSLGRETRQAHQNSPGELSVAKKMALLVFTNFACWSPIAFFGLTALAGYPLINVTKSKILLVFFYPLNSCADPYLYAILTSQYRQDLFTLLSKLGLCQQSALKYKDSLSGQATTRFTIHGSIQRHSSLTCKMQTVMGAETQKMLKNSEDYV

SEQ ID NO: 99 - DNA, 2268 bp, Drosophila melanogaster
  CDS (1)..(2268)
atgctgctgtttctctggtggattgctggctatataatactcgtatctggaggtatgaatccccccctgtacgccctggatcagccgaatgtggcccggtgtctggactactgccacctgaagaacttgcgcttcctcctctgcgtggatgcagatggtcagctgtcgcacaatccctacaaggactgcaaccgaggattctgcaaggccgaggaatttgaactggaatacgaaacggatgaaggcaaggaaaagcgaatcaatcgcgtggagaaaacgagagttgggcaaaaggcaaatctaagggatctatgtctgaacgaacggggaattcccatccgacggaggtgccaaattcgcaatgggaatagagtttggcagagcttggatcacgtgacctgtcggtcggcaccggaactcagctcgagtataaaccttctcgctgtgaagagccctccggacatgattagccaactgagtaacctcctgactcaaactcaggagaaactggcagccgccgatgtcttcagtatttcggagatattcgattcgctggtcaaaaaaccggaaagaaatgctgcagttgtaggggacttgatgaagatatgccaaaaagtgatgtctacagataatgaaacccttcgtgtttcagcagatgctaatgcaaccaatgccctccttagcaacttcgaggattatttggatgagcttagtccaacaattttaaagttaaacaccacttttttttcaaacagcactgagttcacattccatcccttgtttgatatgggtgtcattgttctaaagacgagcgaactcagagtattctttgtagatccagaagtgagaaatgtgagtgggatagtgaacttctctggtggcaatatgtcgcattttgaaatgcttcacctatcggataatgaggaagatataagggccatggagaatctggaaagtgcggtctttattcccgaaaaactatggacccaactgaagagaaagggagcctcttacttagtttttaaggtctatactcgagattcactctttgtggagacggaagaggaaatcaaacgacggccaactagtaatgttatatccataacaataccaggattgaatgataccaagctacctggaaagttgccatttttcttgcgtaatgcaaaagcgaatgaaactcaatttgagggaggatgtggttactggaactatgagacctggcttagcgatggaatatccaccagcggtggtggcagcttggaagcctcatcgcacccagtgatcctctgccatgcggatcatctgacccagtttacatttctactgggagtgagcaaaatgcaggcaggtctggacaccaatgaagatgatcactccttagatgtaatcaccaatgtcggcttgaccctttctctgttgggcctcctaatgatttttataactgcagccgtgtttaagagcttccggacattagcctccacgaagatattgctgaatctgtgtgctgccctgggtcttcagttgctcttcttcctgatcctgagtcaaagccatttgctggagcagctggaacaatctgagtcggaacgatgtactctggttggagccgtgatgcaatatctactcttggttgtcttcagctggatgtttatcattggatttctgcagtatcaaagatatgtgagagtcattggagttaatcacccacgacattatatactaatgtcggctgtggcggcctggacattgccacttatacccaccttgttggtggtttttctggaacccggttcctacaggcccaataattcctcaatggactatcccgtcctctgctatccttctggatatggcttaagtctgggcgtcatacttcctattggccttatcacggtggccaatgcaatattggtgggatacatctcctggagtgtctatacagccctgttcaaacgtgaccttatcttcaagcaactcggcctgttcgtgctgctcttctttcttttgggaataacatggatatttggattgtgtacatacttcgatttcggaaggatcttcgcctatttgttttgcctgacagccactttacagggatttgttttattcctttactttatagtatttaacaaagagaaccagcgggcctggttgggtctcttttgcaattcgagcaagaagaaaaatcagcaaactatacaaatgcccactgactcgattttgcaaggcctaagccattcatcaacaaacagtactagtatttaa

SEQ ID NO: 100 - protein, 755 aa, Drosophila melanogaster
MLLFLWWIAGYIILVSGGMNPPLYALDQPNVARCLDYCHLKNLRFLLCVDADGQLSHNPYKDCNRGFCKAEEFELEYETDEGKEKRINRVEKTRVGQKANLRDLCLNERGIPIRRRCQIRNGNRVWQSLDHVTCRSAPELSSSINLLAVKSPPDMISQLSNLLTQTQEKLAAADVFSISEIFDSLVKKPERNAAVVGDLMKICQKVMSTDNETLRVSADANATNALLSNFEDYLDELSPTILKLNTTFFSNSTEFTFHPLFDMGVIVLKTSELRVFFVDPEVRNVSGIVNFSGGNMSHFEMLHLSDNEEDIRAMENLESAVFIPEKLWTQLKRKGASYLVFKVYTRDSLFVETEEEIKRRPTSNVISITIPGLNDTKLPGKLPFFLRNAKANETQFEGGCGYWNYETWLSDGISTSGGGSLEASSHPVILCHADHLTQFTFLLGVSKMQAGLDTNEDDHSLDVITNVGLTLSLLGLLMIFITAAVFKSFRTLASTKILLNLCAALGLQLLFFLILSQSHLLEQLEQSESERCTLVGAVMQYLLLVVFSWMFIIGFLQYQRYVRVIGVNHPRHYILMSAVAAWTLPLIPTLLVVFLEPGSYRPNNSSMDYPVLCYPSGYGLSLGVILPIGLITVANAILVGYISWSVYTALFKRDLIFKQLGLFVLLFFLLGITWIFGLCTYFDFGRIFAYLFCLTATLQGFVLFLYFIVFNKENQRAWLGLFCNSSKKKNQQTIQMPTDSILQGLSHSSTNSTSI

SEQ ID NO: 101 - DNA, 1320 bp, Drosophila melanogaster
  CDS (1)..(1320)
atgaaaaagaaatatcgtttgcggccagttagattttcacctgaatcacctgcaatcgagcgcaattatcataccggcaaaatggaaaccacaacacctgtgctcgacctgttgatgccgcactactcaactactgtggcgcctccgaaagcgctctatgcaaatcgaaatcgcctgattattggtgttattatcatggttctgggcgtttttggcaattcgctggcccttttcattttggcgcgcaagaagctcaacaaaaacagcaaatacacgctcatgctgcgatgcctggcgaccaacaatctggtggctctactgggcatgctgaccacgacgctgctgaaaatgtatctctcaaaggaggtcctgcagtcgttcatccgagtggattgcgtgggactcgtggtttggcgatttttcgggctcagttctggatgcattgcagcagttatggcggcagaaagatggatggccctagccagaccctttatctaccacaagcacattacctacgagctcattcgcaagagcatcaacagcattctgatgatcgccgtggtgatcacgttcctgccattcgttggttttggtgcatacatcgatgaatccaatccggaccagcttaagtgtatacgatatcgcgatgcgccgggcgtgtggaataagtcgtatgcggtgctctttatggtcttcggtaccctgctgtgcattgtaatcgtggcctgcaatctcttcgtggcccacgccttgctctgtgtgatcggaaggagtcgcacggccaaacggcatatgcactacgacctggtttccagggacaaaaacagtgccatcagcatcgatcccgagagcagcagcggcaccaccctctaccagacgcagctgagcaccggaagcggaaacagccatcgcagtgtacagccggcaaggcagtacaggcacagcgttagcgtcacaatggcggccaccgactcctcgccagtcgagatcaagttcgccaaactaatggcgttcctcagcatctcgttcgtcatctgctggatgccacagatgatcgccatcccgttggctatagctccaaatcgggtgcccgcatcgaacaagttcttcatcatcgccgatgttcttacggcgctgcacttcacctcggatccgtatgtctatgtgctgagtcgctccaagtccatcaactggtccttgctgggatgcattaagcgctggaggagcggatggcgtccgggcggacttcgtcgttcccagagcgaccagagccgcatgcgtacgacgatgacggaggcgaatactctggaattcaactga

SEQ ID NO: 102 - protein, 439 aa, Drosophila melanogaster
MKKKYRLRPVRFSPESPAIERNYHTGKMETTTPVLDLLMPHYSTTVAPPKALYANRNRLIIGVIIMVLGVFGNSLALFILARKKLNKNSKYTLMLRCLATNNLVALLGMLTTTLLKMYLSKEVLQSFIRVDCVGLVVWRFFGLSSGCIAAVMAAERWMALARPFIYHKHITYELIRKSINSILMIAVVITFLPFVGFGAYIDESNPDQLKCIRYRDAPGVWNKSYAVLFMVFGTLLCIVIVACNLFVAHALLCVIGRSRTAKRHMHYDLVSRDKNSAISIDPESSSGTTLYQTQLSTGSGNSHRSVQPARQYRHSVSVTMAATDSSPVEIKFAKLMAFLSISFVICWMPQMIAIPLAIAPNRVPASNKFFIIADVLTALHFTSDPYVYVLSRSKSINWSLLGCIKRWRSGWRPGGLRRSQSDQSRMRTTMTEANTLEFN

SEQ ID NO: 103 - DNA, 1806 bp, Drosophila melanogaster
  CDS (1)..(1806)
atgccatcggcagatcagatcctgtttgtaaatgtcaccacaacggtggcggcggcggctctaaccgctgcggccgccgtcagcaccacaaagtccggaagcggcaacgccgcacggggctacacgaattcggatgacgatgcgggcatgggaacggaggcggtggctaacatatccggctcgctggtggagggcctgaccaccgttaccgcggcattgagtacggctcaggcggacaaggactcagcgggagaatgcgaaggagctgtggaggagctgcatgccagcatcctgggcctccagctggctgtgccggagtgggaggcccttctcaccgccctggttctctcggtcattatcgtgctgaccatcatcgggaacatcctggtgattctgagtgtgttcacctacaagccgctgcgcatcgtccagaacttcttcatagtttcgctggcggtggccgatctcacggtggcccttctggtgctgcccttcaacgtggcttactcgatcctggggcgctgggagttcggcatccacctgtgcaagctgtggctcacctgcgacgtgctgtgctgcactagctccatcctgaacctgtgtgccatagccctcgaccggtactgggccattacggaccccatcaactatgcccagaagaggaccgttggtcgcgtcctgctcctcatctccggggtgtggctactttcgctgctgataagtagtccgccgttgatcggctggaacgactggccggacgagttcacaagcgccacgccctgcgagctgacctcgcagcgaggctacgtgatctactcctcgctgggctccttctttattccgctggccatcatgacgatcgtctacatcgagatcttcgtggccacgcggcgccgcctaagggagcgagccagggccaacaagcttaacacgatcgctctgaagtccactgagctcgagccgatggcaaactcctcgcccgtcgccgcctccaactccggctccaagtcgcgtctcctagccagctggctttgctgcggccgggatcgggcccagttcgccacgcctatgatccagaacgaccaggagagcatcagcagtgaaacccaccagccgcaggattcctccaaagcgggtccccatggcaacagcgatccccaacagcagcacgtggtcgtgctggtcaagaagtcgcgtcgcgccaagaccaaggactccattaagcacggcaagacccgtggtggccgcaagtcgcagtcctcgtccacatgcgagccccacggcgagcaacagctcttacccgccggcggggatggcggtagctgccagcccggcggaggccactctggaggcggaaagtcggacgccgagatcagcacggagagcgggagcgatcccaaaggttgcatacaggtctgcgtgactcaggcggacgagcaaacgtccctaaagctgaccccgccgcaatcctcgacgggagtcgctgccgtttctgtcactccgttgcagaagaagactagtggggttaaccagttcattgaggagaaacagaagatctcgctttccaaggagcggcgagcggctcgcaccctgggcatcatcatgggcgtgttcgtcatctgctggctgcccttcttcctcatgtacgtcattctgcccttctgccagacctgctgccccacgaacaagttcaagaacttcatcacctggctgggctacatcaactcgggcctgaatccggtcatctacaccatcttcaacctggactaccgccgggccttcaagcgacttctgggcctgaattga

SEQ ID NO: 104 - protein, 601 aa, Drosophila melanogaster
MPSADQILFVNVTTTVAAAALTAAAAVSTTKSGSGNAARGYTNSDDDAGMGTEAVANISGSLVEGLTTVTAALSTAQADKDSAGECEGAVEELHASILGLQLAVPEWEALLTALVLSVIIVLTIIGNILVILSVFTYKPLRIVQNFFIVSLAVADLTVALLVLPFNVAYSILGRWEFGIHLCKLWLTCDVLCCTSSILNLCAIALDRYWAITDPINYAQKRTVGRVLLLISGVWLLSLLISSPPLIGWNDWPDEFTSATPCELTSQRGYVIYSSLGSFFIPLAIMTIVYIEIFVATRRRLRERARANKLNTIALKSTELEPMANSSPVAASNSGSKSRLLASWLCCGRDRAQFATPMIQNDQESISSETHQPQDSSKAGPHGNSDPQQQHVVVLVKKSRRAKTKDSIKHGKTRGGRKSQSSSTCEPHGEQQLLPAGGDGGSCQPGGGHSGGGKSDAEISTESGSDPKGCIQVCVTQADEQTSLKLTPPQSSTGVAAVSVTPLQKKTSGVNQFIEEKQKISLSKERRAARTLGIIMGVFVICWLPFFLMYVILPFCQTCCPTNKFKNFITWLGYINSGLNPVIYTIFNLDYRRAFKRLLGLN

SEQ ID NO: 105 - DNA, 1551 bp, Heliothis virescens
  CDS (1)..(1551)
atgcgctcactgaatgaaacagcgtgccaggcgctgttggaagatgtccgctgggatgaatccgtcagcctcgtcagcttagctatactggctcttattgatgtccttgttattgcaggtaactgcctggtgatagcagcagtgttgtgttcatcaaagctgcgcagtgtcacaaatctgttcatcgtatcactggctgtcgcggatctattggtcggcgtcgccgtactgcctttctcagctaccagagaagtttttgaggtatggatattcggagacgtttggtgctcagtatggctggccgtcgatgtctggatgtgcacggcttccatcctgaacctgtgcgccatctccttggaccgctacgtagctgtgaccagaccagtcagctatcctagcatcatgagcaggaagagagctaaagccctaatagctggtctctgggtcttgtctttcgtcatctgtttccctcctctagttggttggaaggataaaaagcctgaagaagcagacatgaaagacggctgggtccccaatcccccctgtgagtggacctgcgagctgaccaacgatgccggttacgtcgtctactcagcccttgggtccttctacatccccatgttcgtgatgcttttcttctattggaggatatacaaagctgctgtcagaactactaaggctatcaatcagggttttagaactacaaaagcctgttctcaatttgcaggcaaaggcatgggtagtcgttttgacgacaaccggctgacgctcagaatacatagagggcgagggtctaacaggccacatggatctccgctatcaaatgcttccaatcactcaaccagcacctctcttagcgcttctcctgaaagattacgaagacattcaagtgcaagaagagctcacgaaaaagtcaagatctctgtgagttactcctcatcagagcagatctgtcctgcccacgagaactccaggtcttcaagcagatctccaagcccttctctctatgcagttcattacgaaagagatggcagggaactgacggagagcaggttgagggtgagaccctcccatcatttggcgccaggacctttgtatgatgagtatgatgataaaccaagaactacgagaagaatggggaaacggaatattaaggctcaggtgaaacgcttccgcatggaaaccaaagctgccaagaccctcggcatcatcgtaggggggttcgtgttctgctggcttccattcttcagcgtgtacgtggtgagggcgttctgtggcgagtgcgtcagccccatagtcttctccgtactcttttggttggggtactgcaattctgctatcaacccgctgatttatgcgctgttttctaaggactttagattcgcattcaaacgcataatctgcaagtgtttctgcggcggcggaggtccgagacgggagtctgacggcgagggctctcggcgtcagaacaaccggcccacccactctcactctttagaagaacatgacgccaacaaccatactaccactacgactgctgcagacaggtag

SEQ ID NO: 106 - protein, 516 aa, Heliothis virescens
MRSLNETACQALLEDVRWDESVSLVSLAILALIDVLVIAGNCLVIAAVLCSSKLRSVTNLFIVSLAVADLLVGVAVLPFSATREVFEVWIFGDVWCSVWLAVDVWMCTASILNLCAISLDRYVAVTRPVSYPSIMSRKRAKALIAGLWVLSFVICFPPLVGWKDKKPEEADMKDGWVPNPPCEWTCELTNDAGYVVYSALGSFYIPMFVMLFFYWRIYKAAVRTTKAINQGFRTTKACSQFAGKGMGSRFDDNRLTLRIHRGRGSNRPHGSPLSNASNHSTSTSLSASPERLRRHSSARRAHEKVKISVSYSSSEQICPAHENSRSSSRSPSPSLYAVHYERDGRELTESRLRVRPSHHLAPGPLYDEYDDKPRTTRRMGKRNIKAQVKRFRMETKAAKTLGIIVGGFVFCWLPFFSVYVVRAFCGECVSPIVFSVLFWLGYCNSAINPLIYALFSKDFRFAFKRIICKCFCGGGGPRRESDGEGSRRQNNRPTHSHSLEEHDANNHTTTTTAADR

SEQ ID NO: 107 - DNA, 1189 bp, Manduca sexta
  CDS (1)..(1188)
atggcggaggagtgtctggcgaggaagttcaacttgtcggacaactactgcccggcgtacttcgatggactcctgtgctgggacccgacgccttggaacaccttggcggtgcagaagtgctttaaagaactgtacgggatacaatacgatgacacacaaaatgcctcacggctgtgcttggacggagtttggcacaactacaccaactatacaaattgcacggagaggatcgcaaacgggtcaccaacagatgtcgctagtctcatatacttggcgggctactccctcagccttgctgttctatcgttagctgtcttcgtattcttgtattttaaggatctgcgatgtttacgaaacacaattcatactaatttaatgtctacatacatattatcagcttgtagttggattttaaatttagttttacaaaactggtcggacgaatctcagcaagaccagacgtcgtgtatgatactcgtcatttgtatgaactatttctatttaactaatttcttctggatgttggtggaaggtttatatctctacatgctagtcgtcgaaacttttacagcggagaatattaaattaaaagtatataccactattggctggggtgctccagctgtatttattacgatatgggtgatatcaaggtgttttgttaacgttttgccgtcaacggggcctgatggattggcgatgttccctgaagcaaagatgtgcatatggatgcatgaacaccaagtggactggatacacaaagcgccagcacttgttggtctcgctcttaatctgttcttcctcattaggattatgtgggtgctgatcacgaaactccgttccgccaacacgctagagactgagcaataccggaaggctaccaaagcgcttctagtcctcatacccttgctgggtataaccaacctcctggtcctctgcggccctagtgacgactcctggttcgcatacgcatttgattacactagggcgcttatgttatcgacacagggcttcacggtagctctgttctactgcttcatgaacactgaggtccggcacgcgatcaggtaccacgtggaaagatggaagactggtcggaccatcggcggggggaggcggcgaggcgcctcttactctaaggactggtctccgagatcgcggaccgaaagcataaggctcacagtatgaa

SEQ ID NO: 108 - protein, 395 aa, Manduca sexta
MAEECLARKFNLSDNYCPAYFDGLLCWDPTPWNTLAVQKCFKELYGIQYDDTQNASRLCLDGVWHNYTNYTNCTERIANGSPTDVASLIYLAGYSLSLAVLSLAVFVFLYFKDLRCLRNTIHTNLMSTYILSACSWILNLVLQNWSDESQQDQTSCMILVICMNYFYLTNFFWMLVEGLYLYMLVVETFTAENIKLKVYTTIGWGAPAVFITIWVISRCFVNVLPSTGPDGLAMFPEAKMCIWMHEHQVDWIHKAPALVGLALNLFFLIRIMWVLITKLRSANTLETEQYRKATKALLVLIPLLGITNLLVLCGPSDDSWFAYAFDYTRALMLSTQGFTVALFYCFMNTEVRHAIRYHVERWKTGRTIGGGRRRGASYSKDWSPRSRTESIRLTV

SEQ ID NO: 109 - DNA, 35 bp, artificial sequence
  primer
  misc_feature (1)..(35): n= inosine
gcatgtctagaggngaybtntggtgyhsnrtntgg

SEQ ID NO: 110 - DNA, 35 bp, artificial sequence
  primer
  misc_feature (1)..(35): n=inosine
gcatgaagcttngtyttngcngcyttngtytccat

SEQ ID NO: 111 - DNA, 26 bp, synthetic oligonucleotide
  misc_feature (1)..(26)
ggatggaagccgtgcacatccayacg

SEQ ID NO: 112 - DNA, 24 bp, synthetic oligonucleotide
  misc_feature (1)..(24)
ggcagggaactgacggagagcagg
